(19) United States
(12) Patent Application Publication
(10) Pub. No.: US 2025/0283071 A1
(43) Pub. Date: Sep. 11, 2025

(54) MODIFIED DOUBLE STRANDED OLIGONUCLEOTIDES

(71) Applicant: ALNYLAM PHARMACEUTICALS, INC., Cambridge, MA (US)

(72) Inventors: Mark K. SCHLEGEL, Cambridge, MA (US); Adam CASTORENO, Cambridge, MA (US); Christopher BROWN, Cambridge, MA (US); Lucas D. BONDURANT, Cambridge, MA (US); Anna BORODOVSKY, Cambridge, MA (US); William CANTLEY, Cambridge, MA (US); Elena CASTELLANOS-RIZALDOS, Cambridge, MA (US); Aimee M. DEATON, Cambridge, MA (US); Jonathan Edward FARLEY, Cambridge, MA (US); Elane FISHILEVICH, Cambridge, MA (US); John Michael GANSNER, Cambridge, MA (US); Jason GILBERT, Cambridge, MA (US); Vasant R. JADHAV, Cambridge, MA (US); Charalambos KAITTANIS, Cambridge, MA (US); Mark KEATING, Cambridge, MA (US); Jingxuan LIU, Cambridge, MA (US); James MCININCH, Cambridge, MA (US); Stuart MILSTEIN, Cambridge, MA (US); Bhaumik A. PANDYA, Cambridge, MA (US); Mangala Meenakshi SOUNDARAPANDIAN, Cambridge, MA (US); Jeffrey ZUBER, Cambridge, MA (US)

(73) Assignee: ALNYLAM PHARMACEUTICALS, INC., Cambridge, MA (US)

(21) Appl. No.: 18/262,302

(22) PCT Filed: Oct. 28, 2021
(86) PCT No.: PCT/US21/57016

§ 371 Date: Jul. 20, 2023

Related U.S. Application Data
(60) Provisional application No. 63/140,714, filed on Jan. 22, 2021.
(60) Provisional application No. 63/146,115, filed on Feb. 5, 2021.
(60) Provisional application No. 63/148,991, filed on Feb. 12, 2021.
(60) Provisional application No. 63/153,983, filed on Feb. 26, 2021.
(60) Provisional application No. 63/156,476, filed on Mar. 4, 2021.
(60) Provisional application No. 63/161,313, filed on Mar. 15, 2021.
(60) Provisional application No. 63/164,467, filed on Mar. 22, 2021.
(60) Provisional application No. 63/179,607, filed on Apr. 26, 2021.
(60) Provisional application No. 63/181,748, filed on Apr. 29, 2021.

(51) Int. Cl. C12N 15/113

(52) U.S. Cl. CPC C12N 15/113; C12N 2310/11; C12N 2310/312; C12N 2310/315; C12N 2310/321; C12N 2310/322; C12N 2310/3515

(57) ABSTRACT

One aspect of the present invention relates to double-stranded RNA (dsRNA) agent capable of inhibiting the expression of a target gene. Other aspects of the invention relate to pharmaceutical compositions comprising these dsRNA molecules suitable for therapeutic use, and methods of inhibiting the expression of a target gene by administering these dsRNA molecules, e.g., for the treatment of various disease conditions.

### CROSS-REFERENCE TO RELATED APPLICATIONS

[0001] This application is a 35 U.S.C. § 371 National Phase Entry Application of International Patent Application No. PCT/US2021/057016 filed on Oct. 28, 2021, which designated the U.S., and which claims benefit under 35 U.S.C. § 119(e) of U.S. Provisional Application No. 63/140,714 filed, Jan. 22, 2021, U.S. Provisional Application No. 63/146,115 filed Feb. 5, 2021, U.S. Provisional Application No. 63/148,991 filed, Feb. 12, 2021, U.S. Provisional Application No. 63/153,983 filed Feb. 26, 2021, U.S. Provisional Application No. 63/156,476 filed Mar. 4, 2021, U.S. Provisional Application No. 63/161,313 filed Mar. 15, 2021, U.S. Provisional Application No. 63/164,467 filed Mar. 22, 2021, U.S. Provisional Application No. 63/179,607 filed Apr. 26, 2021, and U.S. Provisional Application No. 63/181,748 filed Apr. 29, 2021, the contents of each of which are incorporated herein by reference in their entireties.

### SEQUENCE LISTING

[0002] The instant application contains a Sequence Listing which has been submitted electronically in ASCII format and is hereby incorporated by reference in its entirety. Said ASCII copy, created on Dec. 10, 2021, is named O51058-O99300WOPT_SL.txt and is 837,545 bytes in size.

### FIELD OF THE INVENTION

[0003] The invention relates to dsRNA molecules having particular motifs that are advantageous for inhibition of target gene expression, as well dsRNA agent compositions, suitable for therapeutic use. Additionally, the invention provides methods of inhibiting the expression of a target gene by administering these dsRNA agents, e.g., for the treatment of various diseases.

### BACKGROUND

[0004] RNA interference or “RNAi” is a term initially coined by Fire and co-workers to describe the observation that double-stranded RNAi (dsRNA) can block gene expression (Fire et al. (1998) Nature 391, 806-811; Elbashir et al. (2001) Genes Dev. 15, 188-200). Short dsRNA directs gene-specific, post-transcriptional silencing in many organisms, including vertebrates, and has provided a new tool for studying gene function. RNAi is mediated by RNA-induced silencing complex (RISC), a sequence-specific, multi-component nuclease that destroys messenger RNAs homologous to the silencing trigger. RISC is known to contain short RNAs (approximately 22 nucleotides) derived from the double-stranded RNA trigger, but the protein components of this activity remained unknown.

[0005] There remains a need in the art for effective nucleotide or chemical motifs for dsRNA molecules, which are advantageous for inhibition of target gene expression. This invention is directed to that effort.

### SUMMARY

[0006] This invention provides effective nucleotide or chemical motifs for dsRNA molecules, which are advantageous for inhibition of target gene expression, as well as RNAi compositions suitable for therapeutic use.

[0007] Inventors have discovered inter alia that double stranded RNA (dsRNA) molecules having a 2′-fluoro nucleotide at least at position 10 of the sense strand unexpectedly and surprisingly have imporved in vitro potentcy, i.e., increased RNA interference (RNAi) activity. Accordingly, in one aspect provided herein is a double stranded RNA (dsRNA) molecule comprising a sense strand and an antisense strand, each strand independently having a length of 15 to 35 nucleotides, and wherein the sense strand comprises a 2′-fluoro nucleotide at position 10, counting from 5′-end of the sense strand.

[0008] It is noted that the sense strand can further comprises one or more, e.g., 1, 2, 3, 4 or 5 additional 2′-fluoro nucleotides. Accordingly, in some embodiments, the sense strand comprises 1, 2, 3, 4, or 5 additional 2′-fluoro nucleotides. The additional 2′-fluoro nucleotides can be located anywhere in the sense strand. Thus, in some embodiments, the sense strand further comprises a 2′-fluoro nucleotide at position 8, 9, 11 or 12, counting from 5′-end of the sense strand. For example, the sense strand further comprises a 2′-fluoro nucleotide at position 9, counting from 5′-end of the sense strand. In other words, the sense strand comprises a 2′-fluoro nucleotide at positions 9 and 10, counting from 5′-end of the sense strand. In another example, the sense strand further comprises a 2′-fluoro nucleotide at position 11, counting from 5′-end of the sense strand. For example, the sense strand comprises a 2′-fluoro nucleotide at positions 10 and 11, counting from 5′-end of the sense strand.

[0009] In some embodiments, the sense strand comprises a 2′-fluoro nucleotide at positions 9, 10 and 11, counting from 5′-end of the sense strand. In some other embodiments, the sense strand comprises a 2′-fluoro nucleotide at positions 8, 9 and 10, counting from 5′-end of the sense strand. In yet some other embodiments, the sense strand comprises a 2′-fluoro nucleotide at positions 10, 11 and 12, counting from 5′-end of the sense strand.

[0010] In some embodiments of any one of the aspects, the sense strand does not comprise a 2′-fluoro nucleotide at position 7, counting from 5′-end of the sense strand. For example, the sense strand comprises a 2′-OMe nucleotide at position 7, counting from the 5′-end of the sense strand.

[0011] The antisense strand of the dsRNA molecules described herein can comprise one or more 2′-deoxy, e.g., 2′-H nucleotides. For example, the antisense strand comprises 1, 2, 3, 4, 5, 6 or more 2′-deoxy nucleotides. In some embodiments, the antisense strand comprises 2, 3, 4, 5 or 6 2′-deoxy nucleotides. The 2′-deoxy nucleotides can be located anywhere in the antisense strand. For example, the antisense strand comprises a 2′-deoxy nucleotide at 1, 2, 3, 4, 5 or 6 of positions 2, 5, 7, 12, 14 and 16, counting from 5′-end of the antisense strand. In some embodiments, the antisense comprises a 2′-deoxy nucleotide at positions 2 and 12, counting from 5′-end of the antisense strand. In some embodiments, the antisense comprises a 2′-deoxy nucleotide at positions 5 and 7, counting from 5′-end of the antisense strand. In some embodiments, the antisense comprises a 2′-deoxy nucleotide at positions 2, 5, 7 and 12, counting from 5′-end of the antisense strand.

[0012] In some embodiments, the antisense can comprise one or more, e.g., 1, 2, 3, 4, 5 or more of 2′-fluoro nucleotides. For example, the antisense strand can comprise a 2′-fluoro nucleotide at position 14, counting from 5′-end of the antisense strand.

[0013] In some embodiments, the antisense strand comprises a 2′-fluoro nucleotide at position 14 and a nucleotide other than a 2′-deoxy or 2′-fluoro at position 16, ounting from 5′-end of the antisense strand. For example, the antisense strand comprises a 2′-fluoro nucleotide at position 14 and a nucleotide other than a 2′-deoxy or 2′-fluoro at position 16, ounting from 5′-end of the antisense strand

[0014] In some embodiments, the antisense strand comprises a 2′-deoxy nucleotide at positions 2 and 12 and 2′-fluoro nucleotide at position 14, counting from 5′-end of the antisense strand. In some embodiments, the antisense strand comprises a 2′-deoxy nucleotide at positions 2 and 12, a 2′-fluoro nucleotide at position 14, and a nucleotide other than a 2′-deoxy or 2′-fluoro at position 16, counting from 5′-end of the antisense strand. For example, the antisense strand comprises a 2′-deoxy nucleotide at positions 2 and 12, a 2′-fluoro nucleotide at position 14, and a 2′-OMe nucleotide at position 16, counting from 5′-end of the antisense strand.

[0015] In some embodiments, the antisense strand comprises a 2′-deoxy nucleotide at position 14, counting from the 5′-end of the antisense stand, and the sense strand comprises a nucleotide other than a 2′-fluoro at position 7, counting from 5′-end of the sense strand. For example, the antisense strand comprises a 2′-deoxy nucleotide at positions 2, 12 and 14, counting from the 5′-end of the antisense stand, and the sense strand comprises a 2′-fluoro nucleotide at position 10 and anucleotide other than a 2′-fluoro at position 7, counting from 5′-end of the sense strand.

[0016] In various embodiments, the dsRNA molecule has a double stranded (duplex) region of between 19 to 25 base pairs. For example, the dsRNA molecule has a duplex region of 20, 21, 22, 23 or 24 basepairs. In some particular embodiments, the dsRNA molecule has a double duplex) region of 20, 21 or 22 base pairs.

[0017] In some embodiments, the dsRNA molecule comprises a ligand. For example, the sense strand of the dsRNA molecule comprises a ligand. Exemplary ligands include, but are not limited to, ASGPR ligands and ligands comprising a lipophilic group.

[0018] The dsRNA molecule can comprise one or more, e.g., 1, 2, 3, 4, 5, 6, 7, 8 or more phosphorothioate linkages. The phosphorothioate linkages can be present only in one of the strands or in both strands of the dsRNA. For example, the sense strand can comprise 1, 2, 3 or 4 phosphorothioate linkages. In another non-limiting example, the antisense strand can comprise 1, 2, 3, 4, 5 or 6 phosphorothioate linkages. In some embodiments, the sense strand comprises 1, 2, 3 or 4 phosphorothioate linkages and the antisense independently comprises 1, 2, 3, 4, 5, or 6 phosphorothioate linkages. For example, the sense strand comprises 1 or 2 phosphorothioate linkages and the antisense strand comprises 1, 2, 3 or 4 phosphorothioate linkages.

[0019] In some embodiments, the sense strand comprises at least two phosphorothioate internucleotide linkages between the first five nucleotides counting from the 5′ end of the sense strand, the antisense strand comprises at least two phosphorothioate internucleotide linkages between the first five nucleotides counting from the 5′-end of the antisense strand and the antisense further comprises at least two phosphorothioate internucleotide linkages between the first five nucleotides counting from the 3′-end of the antisense strand. For example, the sense strand comprises phosphorothioate linkages between nucleotides 1 and 2, and between nucleotides 2 and 3, counting from 5′-end of the sense strand, and the antisense strand comprises phosphorothioate linkages and between nucleotides 1 and 2, and between nucleotides 2 and 3, counting from 5′-end of the antisense strand, and between nucleotides 1 and 2, and between nucleotides 2 and 3, counting from 3′-end of the antisense strand.

[0020] In some embodiments, the remaning nucleotides in the dsRNA are 2′-OMe nucleotides. For example, all of the remaining nucleotides in the sense strand are 2′-OMe nucleotides. In other words, the sense strand solely comprises 2′-fluoro and 2′-OMe nucleotides.

[0021] It is understood that the antisense strand has sufficient complementarity to a target sequence to mediate RNA interference. In other words, the dsRNA molecules of the invention are capable of inhibiting the expression of a target gene.

[0022] In another aspect, the invention further provides a method for delivering the dsRNA molecule of the invention to a specific target in a subject by subcutaneous or intravenous administration. The invention further provides the dsRNA molecules of the invention for use in a method for delivering said agents to a specific target in a subject by subcutaneous or intravenous administration.

### BRIEF DESCRIPTION OF THE DRAWINGS

[0023] This patent or application file contains at least one drawing executed in color. Copies of this patent or patent application publication with color drawing(s) will be provided by the Office upon request and payment of the necessary fee.

[0024] FIGS. 1A and 1B are graphs showing dsRNAs according to exemplary embodiments of the invention have improved in vitro potency relative to the parent dsRNA molecules when dosed at 10 nM (FIG. 1A) or at 1 nM (FIG. 1).

[0025] FIGS. 2A-2D are graphs showing that dsRNA molecules according to embodiments of the invention have improved in vivo efficacy compared to the parent molecules. Parent duplexes are AD-1181401(Sequence 1, FIG. 2A); AD-1181410(Sequence 2, FIG. 2B); AD-1181426 (Sequence 3, FIG. 2C); and AD-1181451(Sequence 4, FIG. 2D)

[0026] FIGS. 3A-3D are graphs showing dsRNAs according to exemplary embodiments of the invention and targeting different targets have improved in vitro potency relative to the parent dsRNA molecules when dosed at 1 nM (FIGS. 3A and 3B) or at 0.1 nM (FIG. 3C).

[0027] FIGS. 4A-4C are graphs showing that presence of a 2′-fluoro nucleotide at position 10 of the sense strand, counting from the 5′-end of the sense strand, enhances the RNAi efficacy of the dsRNA molecule comprared to the parent.

[0028] FIGS. 5A and 5B are schematic representation of some exemplary designs of dsRNA molecules accorsing to embodiments of the invention.

[0029] FIGS. 6A and 6B are graphs showing improved in vitro target knockdown (FIG. 6A) and log 2 activity (FIG. 6B) of exemplary dsRNA according to some embodiments of the disclosure relative to exemplary parent dsRNA molecules.

[0030] FIGS. 7A and 7B are graphs showing improved in vitro target knockdown of AGT (FIG. 6A) and log 2 activity (FIG. 6B) of exemplary dsRNA according to some embodiments of the disclosure relative to exemplary parent dsRNA molecules targeting AGT.

[0031] FIGS. 8A-8H are showing similar or improved metabolic stability of sense strand (FIGS. 8A-8D) and antisense strand (FIGS. 8E-8H) of exemplary dsRNA molecules in mouse liver homogenate (FIGS. 8A and 8E), rat liver homogenate (FIGS. 8B and 8F), rat brain homogenate (FIGS. 8C and 8G), and cynomologus liver homogenate (FIGS. 8D and 8H). Parent duplexes are AD-1181401(TTR Seq 1); AD-1181410(TTR Seq 2); and AD-74210(F12).

[0032] FIGS. 9A and 9B are showing similar or improved metabolic stability of exemplary dsRNA molecules in mouse. Parent duplexes are AD-1181401(TTR Seq 1); AD-1181410(TTR Seq 2); and AD-74210(F12).

[0033] FIGS. 10A-10D are graphs showing that dsRNA molecules according to embodiments of the invention have improved in vivo efficacy and/or duration in non-human primates, mice (FIGS. 10A and 10B) and in cynomologus monkeys (FIGS. 10C and 10D) compared to the parent molecules AD-74210(FIGS. 10A and 10C) and AD-75885(FIGS. 10B and 10D).

### DETAILED DESCRIPTION

[0034] In one aspect, the invention provides a double-stranded RNA (dsRNA) agent capable of inhibiting expression of a target gene. Without limitations, the dsRNA agents of the invention can be substituted for the dsRNA molecules and can be used in RNA interference based gene silencing techniques, including, but not limited to, in vitro or in vivo applications.

[0035] Generally, the dsRNA molecule comprises a sense strand (also referred to as passenger strand) and an antisense strand (also referred to as guide strand). Each strand of the dsRNA molecule can range from 15-35 nucleotides in length. For example, each strand can be between, 17-35 nucleotides in length, 17-30 nucleotides in length, 25-35 nucleotides in length, 27-30 nucleotides in length, 17-23 nucleotides in length, 17-21 nucleotides in length, 17-19 nucleotides in length, 19-25 nucleotides in length, 19-23 nucleotides in length, 19-21 nucleotides in length, 21-25 nucleotides in length, or 21-23 nucleotides in length. Without limitations, the sense and antisense strands can be equal length or unequal length. For example, the sense strand and the antisense strand independently have a length of 18, 19, 20, 21, 22, 23, 24 or 25 nucleotides.

[0036] In some embodiments, the antisense strand is of length 15-35 nucleotides. In some embodiments, the antisense strand is 15-35, 17-35, 17-30, 25-35, 27-30, 17-23, 17-21, 17-19, 19-25, 19-23, 19-21, 21-25, 21-25, or 21-23 nucleotides in length. For example, the antisense strand can be 15, 16, 17, 18, 19, 20, 21, 22, 23, 24, 25, 26, 27, 28, 29, 30, 31, 32, 33, 34 or 35 nucleotides in length. In some embodiments, the antisense strand is 19, 20, 21, 22, 23, 24 or 25 nucleotides in length. For example, the antisense strand is 21, 22, 23, 24 or 25 nucleotides in length. In some particular embodiments, the antisense strand is 22, 23 or 24 nucleotides in length. For example, the antisense strand is 23 nucleotides in length.

[0037] Similar to the antisense strand, the sense strand can be, in some embodiments, 15-35 nucleotides in length. In some embodiments, the sense strand is 15-35, 17-35, 17-30, 25-35, 27-30, 17-23, 17-21, 17-19, 19-25, 19-23, 19-21, 21-25, 21-25, or 21-23 nucleotides in length. For example, the sense strand can be 15, 16, 17, 18, 19, 20, 21, 22, 23, 24, 25, 26, 27, 28, 29, 30, 31, 32, 33, 34 or 35 nucleotides in length. In some embodiments, the sense strand is 17, 18, 19, 20, 21, 22, 23, 24 or 25 nucleotides in length. For example, the sense strand is 19, 20, 21, 22 or 23 nucleotides in length. In some particular embodiments, the sense strand is 20, 21 or 22 nucleotides in length. For example, the sense strand is 21nucleotides in length

[0038] In some embodiments, the sense strand can be 15-35 nucleotides in length, and the antisense strand can be independent from the sense strand, 15-35 nucleotides in length. In some embodiments, the sense strand is 15-35, 17-35, 17-30, 25-35, 27-30, 17-23, 17-21, 17-19, 19-25, 19-23, 19-21, 21-25, 21-25, or 21-23 nucleotides in length, and the antisense strand is independently 15-35, 17-35, 17-30, 25-35, 27-30, 17-23, 17-21, 17-19, 19-25, 19-23, 19-21, 21-25, 21-25, or 21-23 nucleotides in length. For example, the sense and the antisense strand can be independently 15, 16, 17, 18, 19, 20, 21, 22, 23, 24, 25, 26, 27, 28, 29, 30, 31, 32, 33, 34 or 35 nucleotides in length. In some embodiments, the sense strand and the antisense strand are independently 17, 18, 19, 20, 21, 22, 23, 24 or 25 nucleotides in length. For example, the sense strand is 19, 20, 21, 22 or 23 nucleotides in length and the antisense strand is 21, 22, 23, 24 or 25 nucleotides in length. In some particular embodiments, the sense strand is 20, 21 or 22 nucleotides in length and the antisense strand is 22, 23 or 24 nucleotides in length. For example, the sense strand is 21 nucleotides in length and the antisense strand is 23 nucleotides in length.

[0039] The sense strand and antisense strand typically form a double-stranded or duplex region. Without limitations, the duplex region of a dsRNA agent described herein can be 12-35 nucleotide (or base) pairs in length. For example, the duplex region can be between 14-35 nucleotide pairs in length, 17-30 nucleotide pairs in length, 25-35 nucleotides in length, 27-35 nucleotide pairs in length, 17-23 nucleotide pairs in length, 17-21 nucleotide pairs in length, 17-19 nucleotide pairs in length, 19-25 nucleotide pairs in length, 19-23 nucleotide pairs in length, 19-21 nucleotide pairs in length, 21-25 nucleotide pairs in length, or 21-23 nucleotide pairs in length. In another example, the duplex region is selected from 15, 16, 17, 18, 19, 20, 21, 22, 23, 24, 25, 26, and 27 nucleotide pairs in length. In some embodiments, the duplex region is 18, 19, 20, 21, 22, 23, 24 or 25 nucleotide pairs in length. For example, the duplex region is 19, 20, 21, 22 or 23 nucleotide pairs in length. In some embodiments, the duplex region is 20, 21 or 22 nucleotide pairs in length. For example, the dsRNA molecule has a duplex region of 21 base pairs.

[0040] As described herein, the dsRNA molecule of the invention can further comprise at least one, e.g., 1, 2, 3, 4, 5, 6, 7, 8, 9, 10 or more 2′-deoxy, e.g., 2′-H nucleotides. For example, the dsRNA can comprise 1, 2, 3, 4, 5, 6, 7, 8, 9 or 10 2′-deoxy, e.g., 2′-H nucleotides. The 2′-deoxy nucleotide may occur on any nucleotide of the sense strand or antisense strand or both in any position of the strand. In one non-limiting example, the sense strand does not comprise a 2′-deoxy nucleotide at position 11, counting from 5′-end of the sense strand.

[0041] In some embodiments, the antisense strand the antisense strand comprises 1, 2, 3, 4, 5 or 6 of 2′-deoxy nucleotides. For example, antisense strand can comprise 2, 3, 4, 5 or 6 of 2′-deoxy nucleotides. The 2′-deoxy nucleotides can be located anywhere in the antisense strand. For example, the antisense strand comprises a 2′-deoxy nucleotide at 1, 2, 3, 4, 5 or 6 of positions 2, 5, 7, 12, 14 and 16, counting from 5′-end of the antisense strand. In one non-limiting example, the antisense strand comprises a 2′-deoxy nucleotide at 1, 2, 3 or 4 of positions 2, 5, 7, and 12, counting from 5′-end of the antisense strand.

[0042] In some embodiments, the antisense comprises a 2′-deoxy nucleotide at positions 5 and 7, counting from 5′-end of the antisense strand. For example, the antisense strand comprises a 2′-deoxy nucleotide at positions 5, 7 and 12, counting from 5′-end of the antisense strand. In some embodiments, the antisense strand comprises a 2′-deoxy nucleotide at positions 2, 5 and 7, counting from 5′-end of the antisense strand. For example, the antisense strand comprises a 2′-deoxy nucleotide at positions 2, 5, 7 and 12, counting from 5′-end of the antisense strand. In some embodiments, the antisense strand comprises a 2′-deoxy nucleotide at positions 2, 5, 7, 12 and 14, counting, from 5′-end of the antisense strand. For example, the antisense strand comprises a 2′-deoxy nucleotide at positions 2, 5, 7, 12, 14 and 16, counting from 5′-end of the antisense strand

[0043] In some embodiments, the antisense comprises a 2′-deoxy nucleotide at position 2 or 12, counting from 5′-end of the antisense strand. For example, the antisense comprises a 2′-deoxy nucleotide at position 12, counting from 5′-end of the antisense strand.

[0044] In some embodiments, the sense strand comprises a 2′-fluoro nucleotide at position 10, counting from 5′-end of the sense strand, and the antisense comprises a 2′-deoxy nucleotide at positions 5 and 7, counting from 5′-end of the antisense strand. For example, the sense strand comprises a 2′-fluoro nucleotide at positions 9 and 10, counting from 5′-end of the sense strand, and the antisense comprises a 2′-deoxy nucleotide at positions 5 and 7, counting from 5′-end of the antisense strand. In another example, the sense strand comprises a 2′-fluoro nucleotide at positions 8, 9 and 10, counting from 5′-end of the sense strand, and the antisense comprises a 2′-deoxy nucleotide at positions 5 and 7, counting from 5′-end of the antisense strand.

[0045] In some embodiments, the sense strand comprises a 2′-fluoro nucleotide at positions 10 and 11, counting from 5′-end of the sense strand, and the antisense comprises a 2′-deoxy nucleotide at positions 5 and 7, counting from 5′-end of the antisense strand. For example, the sense strand comprises a 2′-fluoro nucleotide at positions 10, 11 and 12, counting from 5′-end of the sense strand, and the antisense comprises a 2′-deoxy nucleotide at positions 5 and 7, counting from 5′-end of the antisense strand.

[0046] In some embodiments of any one of the aspects, the sense strand does not comprise a 2′-fluoro nucleotide at position 7, counting from 5′-end of the sense strand. For example, the sense strand comprises a 2′-fluoro nucleotide at at least one e.g., 1, 2 or 3 of positions 9, 10 and 11 but does not comprise a 2′-fluoro nucleotide at position 7, counting from 5′-end of the sense strand. In some embodiments, the sense strand comprises a 2′-fluoro nucleotide at position 10 and a nucleotide other than a 2′-fluoro nucleotide at position 7, counting from 5′-end of the sense strand.

[0047] For example, the sense strand comprises a 2′-fluoro nucleotide position 10 and a 2′-OMe nucleotide at position 7, counting from the 5′-end of the sense strand.

[0048] In some embodiments, the sense strand comprises a 2′-fluoro nucleotide at positions 9 and 10, and a nucleotide other than a 2′-fluoro nucleotide at position 7, counting from 5′-end of the sense strand. For example, the sense strand comprises a 2′-fluoro nucleotide at positions 9 and 10, and a 2′-OMe nucleotide at position 7, counting from 5′-end of the sense strand.

[0049] In some embodiments, the sense strand comprises a 2′-fluoro nucleotide at positions 10 and 11, and a nucleotide other than a 2′-fluoro nucleotide at position 7, counting from 5′-end of the sense strand. For example, the sense strand comprises a 2′-fluoro nucleotide at positions 10 and 11, and a 2′-OMe nucleotide at position 7, counting from 5′-end of the sense strand.

[0050] In some embodiments, the sense strand comprises a 2′-fluoro nucleotide at positions 9, 10 and 11, and a nucleotide other than a 2′-fluoro nucleotide at position 7, counting from 5′-end of the sense strand. For example, the sense strand comprises a 2′-fluoro nucleotide at positions 9, 10 and 11, and a 2′-OMe nucleotide at position 7, counting from 5′-end of the sense strand.

[0051] In some embodiments, the sense strand comprises a 2′-fluoro nucleotide at positions 9, 10 and 11, counting from 5′-end of the sense strand, and the remaining nucleotides in the sense strand are 2′-OMe nucleotides.

2′-flouro modifications (antisense strand)

[0052] The dsRNA molecules of the invention comprise one or more (e.g., one, two, three, four, five, six, seven, eight, nine, ten or more)₂′-fluoro nucleotides. Without limitations, the 2′-fluoro nucleotides all can be present in one strand. In some embodiments, both the sense and the antisense strands comprise at least one, 2′-fluoro nucleotide. The 2′-fluoro modification can occur on any nucleotide of the sense strand or antisense strand. For instance, the 2′-fluoro modification can occur on every nucleotide on the sense strand and/or antisense strand; each 2′-fluoro modification can occur in an alternating pattern on the sense strand or antisense strand; or the sense strand or antisense strand comprises both 2′-fluoro modifications in an alternating pattern. The alternating pattern of the 2′-fluoro modifications on the sense strand may be the same or different from the antisense strand, and the alternating pattern of the 2′-fluoro modifications on the sense strand can have a shift relative to the alternating pattern of the 2′-fluoro modifications on the antisense strand.

[0053] In some embodiments, the antisense strand comprises at least two (e.g., two, three, four, five, six, seven, eight, nine, ten or more)₂′-fluoro nucleotides. Without limitations, a 2′-fluoro modification in the antisense strand can be present at any positions.

[0054] In some embodiments, the antisense comprises one or more, e.g., 1, 2, 3, 4, 5 or more 2′-fluoro nucleotides. For example, the antisense strand comprises 1, 2, 3, 4, or 5 more 2′-fluoro nucleotides. In some embodiments, the antisense strand comprises 1, 2 or 3 2′-fluoro nucleotides. For example, the antisense strand comprises a single 2′-fluoro nucleotide. It is noted that a 2′-fluoro nucleotide can be located anywhere in the antisense strand. For example, a 2′-fluoro nucleotide can be at position 2 or 14, counting from 5′-end, of the antisense strand. In some embodiments, the antisense comprises a 2′-fluoro nucleotide at position 14, counting from 5′-end, of the antisense strand.

[0055] In some embodiments, the antisense comprises a 2′-fluoro nucleotide at position 14 and 2′-deoxy nucleotides at positions 5 and 7, counting from 5′-end of the antisense strand. For example, the antisense comprises a 2′-fluoro nucleotide at position 14 and 2′-deoxy nucleotides at positions 5, 7 and 12, counting from 5′-end of the antisense strand. In a further example, the antisense comprises a 2′-fluoro nucleotide at position 14 and 2′-deoxy nucleotides at positions 2, 5, 7 and 12, counting from 5′-end of the antisense strand.

[0056] In some embodiments, the antisense strand comprises a 2′-deoxy nucleotide at positions 2 and 12, counting from the 5′-end of the antisense strand. In some embodiments, the antisense strand further comprises a 2′-fluoro nucleotide at position 14, counting from the 5′-end of the antisense strand. For example, the antisense strand comprises a 2′-deoxy nucleotide at positions 2 and 12 and a 2′-fluoro nucleotide at position 14, counting from the 5′-end of the antisense strand.

[0057] In some embodiments, the antisense strand comprises a nucleotide other than a 2′-deoxy nucleotide at position 16, counting from the 5′-end of the antisense strand. In some embodiments, antisense strand comprises a nucleotide other than a 2′-fluoro nucleotide at position 16, counting from the 5′-end of the antisense strand. For example, the antisense strand comprises a 2′-deoxy nucleotide at positions 2 and 12 and a nucleotide other than a 2′-deoxy or 2′-fluoro nucleotide at position 16, counting from the 5′-end of the antisense strand. In some embodiments, the antisense strand comprises a 2′-deoxy nucleotide at positions 2 and 12 and a 2′-OMe nucleotide at position 16, counting from the 5′-end of the antisense strand.

[0058] In some embodiments, the antisense strand comprises a 2′-deoxy nucleotide at positions 2 and 12, a 2′-fluoro nucleotide at position 14 and a nucleotide other than a 2′-deoxy at position 16, counting from the 5′-end of the antisense strand. In some embodiments, the antisense strand comprises a 2′-deoxy nucleotide at positions 2 and 12, a 2′-fluoro nucleotide at position 14 and a nucleotide other than a 2′-fluoro at position 16, counting from the 5′-end of the antisense strand. For example, the antisense strand comprises a 2′-deoxy nucleotide at positions 2 and 12, a 2′-fluoro nucleotide at position 14 and a nucleotide other than a 2′-deoxy or 2′-fluoro nucleotide at position 16, counting from the 5′-end of the antisense strand. In some embodiments, the antisense strand comprises a 2′-deoxy nucleotide at positions 2 and 12, a 2′-fluoro nucleotide at position 14, and a 2′-OMe nucleotide at position 16, counting from the 5′-end of the antisense strand.

[0059] In some embodiments, the antisense strand comprises a 2′-deoxy nucleotide at positions 2, 5, 7 and 12 and a 2′-fluoro nucleotide at position 14, counting from the 5′-end of the antisense strand, and the remaining nucleotides in the antisense strand are 2′-OMe nucleotides.

[0060] In some embodiments, the antisense strand comprises a 2′-deoxy nucleotide at positions 2, 5, 7 and 12 and a 2′-fluoro nucleotide at position 14, counting from the 5′-end of the antisense strand, the sense strand comprises a 2′-fluoro nucleotide at positions 9, 10 and 11, counting from 5′-end of the sense strand, and the remaining nucleotides in the antisense strand and the sense strand are 2′-OMe nucleotides.

[0061] In some embodiments, the antisense strand comprises a 2′-deoxy nucleotide at positions 2, 5, 7, 12 and 14, counting from the 5′-end of the antisense strand, and the remaining nucleotides in the antisense strand are 2′-OMe nucleotides.

[0062] In some embodiments, the antisense strand comprises a 2′-deoxy nucleotide at positions 2, 5, 7, 12 and 14, counting from the 5′-end of the antisense strand, the sense strand comprises a 2′-fluoro nucleotide at positions 9, 10 and 11, counting from 5′-end of the sense strand, and the remaining nucleotides in the antisense strand and the sense strand are 2′-OMe nucleotides.

[0063] In some embodiments, the antisense strand comprises a 2′-deoxy nucleotide at positions 2, 5, 7, 12 and 16, counting from the 5′-end of the antisense strand, and the remaining nucleotides in the antisense strand are 2′-OMe nucleotides.

[0064] In some embodiments, the antisense strand comprises a 2′-deoxy nucleotide at positions 2, 5, 7, 12 and 16, counting from the 5′-end of the antisense strand, the sense strand comprises a 2′-fluoro nucleotide at positions 9, 10 and 11, counting from 5′-end of the sense strand, and the remaining nucleotides in the antisense strand and the sense strand are 2′-OMe nucleotides.

[0065] In some embodiments, the antisense strand comprises a 2′-deoxy nucleotide at positions 2, 5, 7, 12, 14 and 16, counting from the 5′-end of the antisense strand, and the remaining nucleotides in the antisense strand are 2′-OMe nucleotides.

[0066] In some embodiments, the antisense strand comprises a 2′-deoxy nucleotide at positions 2, 5, 7, 12, 14 and 16, counting from the 5′-end of the antisense strand, the sense strand comprises a 2′-fluoro nucleotide at positions 9, 10 and 11, counting from 5′-end of the sense strand, and the remaining nucleotides in the antisense strand and the sense strand are 2′-OMe nucleotides.

[0067] It is noted the remaining nucleotides, i.e., at positions not explicitly defined in the sense strand and/or the antisense strand can be unmodified or modified nucleotides. Accordingly, in some embodiments, the remaining nucleotides, i.e., at positions not explicitly defined in the sense strand are unmodified or modified nucleotides. For example, the remaining nucleotides, i.e., at positions not explicitly defined in the sense strand can be modified nucleotides selected from the group consisting of 2′-OMe, 2′-F, 2′-H, and an 2′-O—C10-30aliphatic group, optionally provided no more than one modified nucleotide is an 2′-O—C10-30aliphatic group.

[0068] In some embodiments, the remaining nucleotides, i.e., at positions not explicitly defined in the antisense strand are unmodified or modified nucleotides. For example, the remaining nucleotides, i.e., at positions not explicitly defined in the antisense strand can be modified nucleotides. In some embodiments, the remaining nucleotides, i.e., at positions not explicitly defined in the antisense strand can be selected from the group consisting of 2′-OMe, 2′-F, 2′-H, GNA and 3′-RNA, the 3′-RNA being optionally 3′-OH, provided no more than one modified nucleotide is GNA or 3′-RNA.

[0069] In some embodiments, the remaining nucleotides in the sense strand and/or the antisense strand are 2′-OMe nucleotides.

[0070] As described herein, the dsRNA agent can comprise one or more, e.g., 1, 2, 3, 4, 5, 6, 7, 8, 9, 10 or more nucleotides comprising a modified sugar. By a “modified sugar” is meant a sugar other than 2′-deoxy (i.e, 2′-H), 2′-OH, 2′-F or 2′-OMe ribose sugar. Some exemplary nucleotides comprising a modified sugar are locked nucleic acid (LNA), HNA, CeNA, 2′-methoxyethyl, 2′-O-allyl, 2′-C-allyl, 2′-O—N-methylacetamido (2′-O-NMA), a 2′-O-dimethylaminoethoxyethyl(2′-O-DMAEOE), 2′-O-aminopropyl(2′-O-AP), and 2′-ara-F. Accordingly, in some embodiments, the dsRNA agent can comprise one or more, e.g., 1, 2, 3, 4, 5, 6, 7, 8, 9, 10 or more nucleotides independently selected from the group consisting of acyclic nucleotides, locked nucleic acid (LNA), HNA, CeNA, 2′-methoxyethyl, 2′-O-allyl, 2′-C-allyl, 2′-O—N-methylacetamido (2′-O-NMA), a 2′-O-dimethylaminoethoxyethyl(2′-O-DMAEOE), 2′-O-aminopropyl(2′-O-AP), and 2′-ara-F. A nucleotide comprising modified sugar can be present anywherein the dsRNA molecule. For example, a nucleotide comprising a modified sugar can be present in the sense strand or a nucleotide comprising a modified sugar can be present in the antisense strand. When two or more nuelcotides comprising a modified sugar are present in the dsRNA molecule, they can all be in the sense strand, antisense strand or both in the sense and antisense strands.

[0071] In some embodiments, an unmodified nucleotide is a 2′-OH nucleotide comprising an unmodified nucleobase, i.e., adenine, guanine, cytosine, or uracil.

[0072] In some embodiments, the dsRNA can comprise one or more, e.g., 1, 2, 3, 4, 5, 6, 7, 8, 9, 10 or more nucleotides comprising a non-natural nucleobase. By a “non-natural nucleobase” is meant a nucleobase other than adenine, guanine, cytosine, uracil, or thymine. Exemplary non-natural nucleobases include, but are not limited to, inosine, xanthine, hypoxanthine, nubularine, isoguanisine, tubercidine, and substituted or modified analogs of adenine, guanine, cytosine and uracil, such as 2-aminoadenine, 6-methyl and other alkyl derivatives of adenine and guanine, 2-propyl and other alkyl derivatives of adenine and guanine, 5-halouracil and cytosine, 5-propynyl uracil and cytosine, 6-azo uracil, cytosine and thymine, 5-uracil (pseudouracil), 4-thiouracil, 5-halouracil, 5-(2-aminopropyl) uracil, 5-amino allyl uracil, 8-halo, amino, thiol, thioalkyl, hydroxyl and other 8-substituted adenines and guanines, 5-trifluoromethyl and other 5-substituted uracils and cytosines, 7-methylguanine, 5-substituted pyrimidines, 6-azapyrimidines and N-2, N-6 and O-6 substituted purines, including 2-aminopropyladenine, 5-propynyluracil and 5-propynylcytosine, dihydrouracil, 3-deaza-5-azacytosine, 2-aminopurine, 5-alkyluracil, 7-alkylguanine, 5-alkyl cytosine, 7-deazaadenine, N6, N6-dimethyladenine, 2,6-diaminopurine, 5-amino-allyl-uracil, N3-methyluracil, substituted 1,2,4-triazoles, 2-pyridinone, 5-nitroindole, 3-nitropyrrole, 5-methoxyuracil, uracil-5-oxyacetic acid, 5-methoxycarbonylmethyluracil, 5-methyl-2-thiouracil, 5-methoxycarbonylmethyl-2-thiouracil, 5-methylaminomethyl-2-thiouracil, 3-(3-amino-3carboxypropyl) uracil, 3-methylcytosine, 5-methylcytosine, N4-acetyl cytosine, 2-thiocytosine, N6-methyladenine, N6-isopentyladenine, 2-methylthio-N6-isopentenyladenine, N-methylguanines, or O-alkylated bases. Further purines and pyrimidines include those disclosed in U.S. Pat. No. 3,687,808, those disclosed in the Concise Encyclopedia of Polymer Science and Engineering, pages 858-859, Kroschwitz, J. I., ed. John Wiley & Sons, 1990, and those disclosed by Englisch et al., Angewandte Chemie, International Edition, 1991, 30, 613.

[0073] In some embodiments, the non-natural nucleobase can be selected from the group consisting of inosine, xanthine, hypoxanthine, nubularine, isoguanisine, tubercidine, 2-(halo) adenine, 2-(alkyl) adenine, 2-(propyl) adenine, 2-(amino) adenine, 2-(aminoalkyll) adenine, 2-(aminopropyl) adenine, 2-(methylthio)-N⁶-(isopentenyl) adenine, 6-(alkyl) adenine, 6-(methyl) adenine, 7-(deaza) adenine, 8-(alkenyl) adenine, 8-(alkyl) adenine, 8-(alkynyl) adenine, 8-(amino) adenine, 8-(halo) adenine, 8-(hydroxyl) adenine, 8-(thioalkyl) adenine, 8-(thiol) adenine, N⁶-(isopentyl) adenine, N⁶-(methyl) adenine, N⁶, N⁶-(dimethyl) adenine, 2-(alkyl) guanine, 2-(propyl) guanine, 6-(alkyl) guanine, 6-(methyl) guanine, 7-(alkyl) guanine, 7-(methyl) guanine, 7-(deaza) guanine, 8-(alkyl) guanine, 8-(alkenyl) guanine, 8-(alkynyl) guanine, 8-(amino) guanine, 8-(halo) guanine, 8-(hydroxyl) guanine, 8-(thioalkyl) guanine, 8-(thiol) guanine, N-(methyl) guanine, 2-(thio) cytosine, 3-(deaza)-5-(aza) cytosine, 3-(alkyl) cytosine, 3-(methyl) cytosine, 5-(alkyl) cytosine, 5-(alkynyl) cytosine, 5-(halo) cytosine, 5-(methyl) cytosine, 5-(propynyl) cytosine, 5-(propynyl) cytosine, 5-(trifluoromethyl) cytosine, 6-(azo) cytosine, N⁴-(acetyl) cytosine, 3-(3-amino-3-carboxypropyl) uracil, 2-(thio) uracil, 5-(methyl)-2-(thio) uracil, 5-(methylaminomethyl)-2-(thio) uracil, 4-(thio) uracil, 5-(methyl)-4-(thio) uracil, 5-(methylaminomethyl)-4-(thio) uracil, 5-(methyl)-2,4-(dithio) uracil, 5-(methylaminomethyl)-2,4-(dithio) uracil, 5-(2-aminopropyl) uracil, 5-(alkyl) uracil, 5-(alkynyl) uracil, 5-(allylamino) uracil, 5-(aminoallyl) uracil, 5-(aminoalkyl) uracil, 5-(guanidiniumalkyl) uracil, 5-(1,3-diazole-1-alkyl) uracil, 5-(cyanoalkyl) uracil, 5-(dialkylaminoalkyl) uracil, 5-(dimethylaminoalkyl) uracil, 5-(halo) uracil, 5-(methoxy) uracil, uracil-5-oxyacetic acid, 5-(methoxycarbonylmethyl)-2-(thio) uracil, 5-(methoxycarbonyl-methyl) uracil, 5-(propynyl) uracil, 5-(propynyl) uracil, 5-(trifluoromethyl) uracil, 6-(azo) uracil, dihydrouracil, N³-(methyl) uracil, 5-uracil (i.e., pseudouracil), 2-(thio) pseudouracil, 4-(thio) pseudouracil, 2,4-(dithio) psuedouracil, 5-(alkyl) pseudouracil, 5-(methyl) pseudouracil, 5-(alkyl)-2-(thio) pseudouracil, 5-(methyl)-2-(thio) pseudouracil, 5-(alkyl)-4-(thio) pseudouracil, 5-(methyl)-4-(thio) pseudouracil, 5-(alkyl)-2,4-(dithio) pseudouracil, 5-(methyl)-2,4-(dithio) pseudouracil, 1-substituted pseudouracil, 1-substituted 2(thio)-pseudouracil, 1-substituted 4-(thio) pseudouracil, 1-substituted 2,4-(dithio) pseudouracil, 1-(aminocarbonylethylenyl)-pseudouracil, 1-(aminocarbonylethylenyl)-2(thio)-pseudouracil, 1-(aminocarbonylethylenyl)-4-(thio) pseudouracil, 1-(aminocarbonylethylenyl)-2,4-(dithio) pseudouracil, 1-(aminoalkylaminocarbonylethylenyl)-pseudouracil, 1-(aminoalkylamino-carbonylethylenyl)-2(thio)-pseudouracil, 1-(aminoalkylaminocarbonylethylenyl)-4-(thio) pseudouracil, 1-(aminoalkylaminocarbonylethylenyl)-2,4-(dithio) pseudouracil, 1,3-(diaza)-2-(oxo)-phenoxazin-1-yl, 1-(aza)-2-(thio)-3-(aza)-phenoxazin-1-yl, 1,3-(diaza)-2-(oxo)-phenthiazin-1-yl, 1-(aza)-2-(thio)-3-(aza)-phenthiazin-1-yl, 7-substituted 1,3-(diaza)-2-(oxo)-phenoxazin-1-yl, 7-substituted 1-(aza)-2-(thio)-3-(aza)-phenoxazin-1-yl, 7-substituted 1,3-(diaza)-2-(oxo)-phenthiazin-1-yl, 7-substituted 1-(aza)-2-(thio)-3-(aza)-phenthiazin-1-yl, 7-(aminoalkylhydroxy)-1,3-(diaza)-2-(oxo)-phenoxazin-1-yl, 7-(aminoalkylhydroxy)-1-(aza)-2-(thio)-3-(aza)-phenoxazin-1-yl, 7-(aminoalkylhydroxy)-1,3-(diaza)-2-(oxo)-phenthiazin-1-yl, 7-(aminoalkylhydroxy)-1-(aza)-2-(thio)-3-(aza)-phenthiazin-1-yl, 7-(guanidiniumalkylhydroxy)-1,3-(diaza)-2-(oxo)-phenoxazin-1-yl, 7-(guanidiniumalkylhydroxy)-1-(aza)-2-(thio)-3-(aza)-phenoxazin-1-yl, 7-(guanidiniumalkyl-hydroxy)-1,3-(diaza)-2-(oxo)-phenthiazin-1-yl, 7-(guanidiniumalkylhydroxy)-1-(aza)-2-(thio)-3-(aza)-phenthiazin-1-yl, 1,3,5-(triaza)-2,6-(dioxa)-naphthalene, inosine, xanthine, hypoxanthine, nubularine, tubercidine, isoguanisine, inosinyl, 2-aza-inosinyl, 7-deaza-inosinyl, nitroimidazolyl, nitropyrazolyl, nitrobenzimidazolyl, nitroindazolyl, aminoindolyl, pyrrolopyrimidinyl, 3-(methyl) isocarbostyrilyl, 5-(methyl) isocarbostyrilyl, 3-(methyl)-7-(propynyl) isocarbostyrilyl, 7-(aza) indolyl, 6-(methyl)-7-(aza) indolyl, imidizopyridinyl, 9-(methyl)-imidizopyridinyl, pyrrolopyrizinyl, isocarbostyrilyl, 7-(propynyl) isocarbostyrilyl, propynyl-7-(aza) indolyl, 2,4,5-(trimethyl)phenyl, 4-(methyl) indolyl, 4,6-(dimethyl) indolyl, phenyl, napthalenyl, anthracenyl, phenanthracenyl, pyrenyl, stilbenyl, tetracenyl, pentacenyl, difluorotolyl, 4-(fluoro)-6-(methyl)benzimidazole, 4-(methyl)benzimidazole, 6-(azo) thymine, 2-pyridinone, 5-nitroindole, 3-nitropyrrole, 6-(aza)pyrimidine, 2-(amino) purine, 2,6-(diamino) purine, 5-substituted pyrimidines, N²-substituted purines, N⁶-substituted purines, O⁶-substituted purines, substituted 1,2,4-triazoles, and any O-alkylated or N-alkylated derivatives thereof.

[0074] A nucleotide comprising a non-natural nucleobase can be present anywherein the dsRNA molecule. For example, a nucleotide comprising a non-natural nucleobase can be present in the sense strand or a nucleotide comprising a non-natural nucleobase can be present in the antisense strand. When two or more nuelcotides comprising a non-natural nucleobase are present in the dsRNA molecule, they can all be in the sense strand, antisense strand or both in the sense and antisense strands.

[0075] The dsRNA molecule of the invention can further comprise at least one phosphorothioate or methylphosphonate internucleotide linkage. The phosphorothioate or methylphosphonate internucleotide linkage modification may occur on any nucleotide of the sense strand or antisense strand or both in any position of the strand. For instance, the internucleotide linkage modification may occur on every nucleotide on the sense strand and/or antisense strand; each internucleotide linkage modification may occur in an alternating pattern on the sense strand or antisense strand; or the sense strand or antisense strand comprises both internucleotide linkage modifications in an alternating pattern. The alternating pattern of the internucleotide linkage modification on the sense strand may be the same or different from the antisense strand, and the alternating pattern of the internucleotide linkage modification on the sense strand may have a shift relative to the alternating pattern of the internucleotide linkage modification on the antisense strand.

[0076] In some embodiments, the dsRNA molecule comprises the phosphorothioate or methylphosphonate internucleotide linkage modification in the overhang region. For example, the overhang region comprises two nucleotides having a phosphorothioate or methylphosphonate internucleotide linkage between the two nucleotides. Internucleotide linkage modifications also may be made to link the overhang nucleotides with the terminal paired nucleotides within duplex region. For example, at least 2, 3, 4, or all the overhang nucleotides may be linked through phosphorothioate or methylphosphonate internucleotide linkage, and optionally, there may be additional phosphorothioate or methylphosphonate internucleotide linkages linking the overhang nucleotide with a paired nucleotide that is next to the overhang nucleotide. For instance, there may be at least two phosphorothioate internucleotide linkages between the terminal three nucleotides, in which two of the three nucleotides are overhang nucleotides, and the third is a paired nucleotide next to the overhang nucleotide. Preferably, these terminal three nucleotides may be at the 3′-end of the antisense strand.

[0077] In some embodiments, the sense strand of the dsRNA molecule comprises 1-10 blocks of two to ten phosphorothioate or methylphosphonate internucleotide linkages separated by 1, 2, 3, 4, 5, 6, 7, 8, 9, 10, 11, 12, 13, 14, 15 or 16 phosphate internucleotide linkages, wherein one of the phosphorothioate or methylphosphonate internucleotide linkages is placed at any position in the oligonucleotide sequence and the said sense strand is paired with an antisense strand comprising any combination of phosphorothioate, methylphosphonate and phosphate internucleotide linkages or an antisense strand comprising either phosphorothioate or methylphosphonate or phosphate linkage.

[0078] In some embodiments, the antisense strand of the dsRNA molecule comprises two blocks of two phosphorothioate or methylphosphonate internucleotide linkages separated by 1, 2, 3, 4, 5, 6, 7, 8, 9, 10, 11, 12, 13, 14, 15, 16, 17, or 18 phosphate internucleotide linkages, wherein one of the phosphorothioate or methylphosphonate internucleotide linkages is placed at any position in the oligonucleotide sequence and the said antisense strand is paired with a sense strand comprising any combination of phosphorothioate, methylphosphonate and phosphate internucleotide linkages or an antisense strand comprising either phosphorothioate or methylphosphonate or phosphate linkage.

[0079] In some embodiments, the antisense strand of the dsRNA molecule comprises two blocks of three phosphorothioate or methylphosphonate internucleotide linkages separated by 1, 2, 3, 4, 5, 6, 7, 8, 9, 10, 11, 12, 13, 14, 15 or 16 phosphate internucleotide linkages, wherein one of the phosphorothioate or methylphosphonate internucleotide linkages is placed at any position in the oligonucleotide sequence and the said antisense strand is paired with a sense strand comprising any combination of phosphorothioate, methylphosphonate and phosphate internucleotide linkages or an antisense strand comprising either phosphorothioate or methylphosphonate or phosphate linkage.

[0080] In some embodiments, the antisense strand of the dsRNA molecule comprises two blocks of four phosphorothioate or methylphosphonate internucleotide linkages separated by 1, 2, 3, 4, 5, 6, 7, 8, 9, 10, 11, 12, 13 or 14 phosphate internucleotide linkages, wherein one of the phosphorothioate or methylphosphonate internucleotide linkages is placed at any position in the oligonucleotide sequence and the said antisense strand is paired with a sense strand comprising any combination of phosphorothioate, methylphosphonate and phosphate internucleotide linkages or an antisense strand comprising either phosphorothioate or methylphosphonate or phosphate linkage.

[0081] In some embodiments, the antisense strand of the dsRNA molecule comprises two blocks of five phosphorothioate or methylphosphonate internucleotide linkages separated by 1, 2, 3, 4, 5, 6, 7, 8, 9, 10, 11 or 12 phosphate internucleotide linkages, wherein one of the phosphorothioate or methylphosphonate internucleotide linkages is placed at any position in the oligonucleotide sequence and the said antisense strand is paired with a sense strand comprising any combination of phosphorothioate, methylphosphonate and phosphate internucleotide linkages or an antisense strand comprising either phosphorothioate or methylphosphonate or phosphate linkage.

[0082] In some embodiments, the antisense strand of the dsRNA molecule comprises two blocks of six phosphorothioate or methylphosphonate internucleotide linkages separated by 1, 2, 3, 4, 5, 6, 7, 8, 9 or 10 phosphate internucleotide linkages, wherein one of the phosphorothioate or methylphosphonate internucleotide linkages is placed at any position in the oligonucleotide sequence and the said antisense strand is paired with a sense strand comprising any combination of phosphorothioate, methylphosphonate and phosphate internucleotide linkages or an antisense strand comprising either phosphorothioate or methylphosphonate or phosphate linkage.

[0083] In some embodiments, the antisense strand of the dsRNA molecule comprises two blocks of seven phosphorothioate or methylphosphonate internucleotide linkages separated by 1, 2, 3, 4, 5, 6, 7 or 8 phosphate internucleotide linkages, wherein one of the phosphorothioate or methylphosphonate internucleotide linkages is placed at any position in the oligonucleotide sequence and the said antisense strand is paired with a sense strand comprising any combination of phosphorothioate, methylphosphonate and phosphate internucleotide linkages or an antisense strand comprising either phosphorothioate or methylphosphonate or phosphate linkage.

[0084] In some embodiments, the antisense strand of the dsRNA molecule comprises two blocks of eight phosphorothioate or methylphosphonate internucleotide linkages separated by 1, 2, 3, 4, 5 or 6 phosphate internucleotide linkages, wherein one of the phosphorothioate or methylphosphonate internucleotide linkages is placed at any position in the oligonucleotide sequence and the said antisense strand is paired with a sense strand comprising any combination of phosphorothioate, methylphosphonate and phosphate internucleotide linkages or an antisense strand comprising either phosphorothioate or methylphosphonate or phosphate linkage.

[0085] In some embodiments, the antisense strand of the dsRNA molecule comprises two blocks of nine phosphorothioate or methylphosphonate internucleotide linkages separated by 1, 2, 3 or 4 phosphate internucleotide linkages, wherein one of the phosphorothioate or methylphosphonate internucleotide linkages is placed at any position in the oligonucleotide sequence and the said antisense strand is paired with a sense strand comprising any combination of phosphorothioate, methylphosphonate and phosphate internucleotide linkages or an antisense strand comprising either phosphorothioate or methylphosphonate or phosphate linkage.

[0086] In some embodiments, the dsRNA molecule of the invention further comprises one or more phosphorothioate or methylphosphonate internucleotide linkage modification within 1-10 of the termini position(s) of the sense and/or antisense strand. For example, at least 2, 3, 4, 5, 6, 7, 8, 9 or 10 nucleotides may be linked through phosphorothioate or methylphosphonate internucleotide linkage at one end or both ends of the sense and/or antisense strand.

[0087] In some embodiments, the dsRNA molecule of the invention comprises one or more phosphorothioate or methylphosphonate internucleotide linkage modification within 1-10 of the internal region of the duplex of each of the sense and/or antisense strand. For example, at least 2, 3, 4, 5, 6, 7, 8, 9 or 10 nucleotides may be linked through phosphorothioate methylphosphonate internucleotide linkage at position 8-16 of the duplex region counting from the 5′-end of the sense strand; the dsRNA molecule can optionally further comprise one or more phosphorothioate or methylphosphonate internucleotide linkage modification within 1-10 of the termini position(s).

[0088] In some embodiments, the dsRNA molecule of the invention further comprises one to five phosphorothioate or methylphosphonate internucleotide linkage modification(s) within position 1-5 and one to five phosphorothioate or methylphosphonate internucleotide linkage modification(s) within the last 3 positions of the sense strand (counting from the 5′-end), and one to five phosphorothioate or methylphosphonate internucleotide linkage modification at positions 1 and 2 and one to five phosphorothioate or methylphosphonate internucleotide linkage modification within the last six positions of the antisense strand (counting from the 5′-end).

[0089] In some embodiments, the dsRNA molecule of the invention further comprises one phosphorothioate internucleotide linkage modification within position 1-5 and one phosphorothioate or methylphosphonate internucleotide linkage modification within the last six positions of the sense strand (counting from the 5′-end), and one phosphorothioate internucleotide linkage modification at positions 1 and 2 and two phosphorothioate or methylphosphonate internucleotide linkage modifications within the last six the last six positions of the antisense strand (counting from the 5′-end).

[0090] In some embodiments, the dsRNA molecule of the invention further comprises two phosphorothioate internucleotide linkage modifications within position 1-5 and one phosphorothioate internucleotide linkage modification within the last six positions of the sense strand (counting from the 5′-end), and one phosphorothioate internucleotide linkage modification at positions 1 and 2 and two phosphorothioate internucleotide linkage modifications within the last six positions of the antisense strand (counting from the 5′-end).

[0091] In some embodiments, the dsRNA molecule of the invention further comprises two phosphorothioate internucleotide linkage modifications within position 1-5 and two phosphorothioate internucleotide linkage modifications within the last four positions of the sense strand (counting from the 5′-end), and one phosphorothioate internucleotide linkage modification at positions 1 and 2 and two phosphorothioate internucleotide linkage modifications within the last six positions of the antisense strand (counting from the 5′-end).

[0092] In some embodiments, the dsRNA molecule of the invention further comprises two phosphorothioate internucleotide linkage modifications within position 1-5 and two phosphorothioate internucleotide linkage modifications within the last four positions of the sense strand (counting from the 5′-end), and one phosphorothioate internucleotide linkage modification at positions 1 and 2 and one phosphorothioate internucleotide linkage modification within the last six positions of the antisense strand (counting from the 5′-end).

[0093] In some embodiments, the dsRNA molecule of the invention further comprises one phosphorothioate internucleotide linkage modification within position 1-5 and one phosphorothioate internucleotide linkage modification within the last four positions of the sense strand (counting from the 5′-end), and two phosphorothioate internucleotide linkage modifications at positions 1 and 2 and two phosphorothioate internucleotide linkage modifications within the last six positions of the antisense strand (counting from the 5′-end).

[0094] In some embodiments, the dsRNA molecule of the invention further comprises one phosphorothioate internucleotide linkage modification within position 1-5 and one within the last six positions of the sense strand (counting from the 5′-end), and two phosphorothioate internucleotide linkage modification at positions 1 and 2 and one phosphorothioate internucleotide linkage modification within the last six positions of the antisense strand (counting from the 5′-end).

[0095] In some embodiments, the dsRNA molecule of the invention further comprises one phosphorothioate internucleotide linkage modification within position 1-5(counting from the 5′-end) of the sense strand, and two phosphorothioate internucleotide linkage modifications at positions 1 and 2 and one phosphorothioate internucleotide linkage modification within the last six positions of the antisense strand (counting from the 5′-end).

[0096] In some embodiments, the dsRNA molecule of the invention further comprises two phosphorothioate internucleotide linkage modifications within position 1-5(counting from the 5′-end) of the sense strand, and one phosphorothioate internucleotide linkage modification at positions 1 and 2 and two phosphorothioate internucleotide linkage modifications within the last six positions of the antisense strand (counting from the 5′-end).

[0097] In some embodiments, the dsRNA molecule of the invention further comprises two phosphorothioate internucleotide linkage modifications within position 1-5 and one within the last six positions of the sense strand (counting from the 5′-end), and two phosphorothioate internucleotide linkage modifications at positions 1 and 2 and one phosphorothioate internucleotide linkage modification within the last six positions of the antisense strand (counting from the 5′-end).

[0098] In some embodiments, the dsRNA molecule of the invention further comprises two phosphorothioate internucleotide linkage modifications within position 1-5 and one phosphorothioate internucleotide linkage modification within the last six positions of the sense strand (counting from the 5′-end), and two phosphorothioate internucleotide linkage modifications at positions 1 and 2 and two phosphorothioate internucleotide linkage modifications within the last six positions of the antisense strand (counting from the 5′-end).

[0099] In some embodiments, the dsRNA molecule of the invention further comprises two phosphorothioate internucleotide linkage modifications within position 1-5 and one phosphorothioate internucleotide linkage modification within the last six positions of the sense strand (counting from the 5′-end), and one phosphorothioate internucleotide linkage modification at positions 1 and 2 and two phosphorothioate internucleotide linkage modifications within the last six positions of the antisense strand (counting from the 5′-end).

[0100] In some embodiments, the dsRNA molecule of the invention further comprises two phosphorothioate internucleotide linkage modifications at position 1 and 2, and two phosphorothioate internucleotide linkage modifications at position 20 and 21 of the sense strand (counting from the 5′-end), and one phosphorothioate internucleotide linkage modification at positions 1 and one at position 21 of the antisense strand (counting from the 5′-end).

[0101] In some embodiments, the dsRNA molecule of the invention further comprises one phosphorothioate internucleotide linkage modification at position 1, and one phosphorothioate internucleotide linkage modification at position 21 of the sense strand (counting from the 5′-end), and two phosphorothioate internucleotide linkage modifications at positions 1 and 2 and two phosphorothioate internucleotide linkage modifications at positions 20 and 21 the antisense strand (counting from the 5′-end).

[0102] In some embodiments, the dsRNA molecule of the invention further comprises two phosphorothioate internucleotide linkage modifications at position 1 and 2, and two phosphorothioate internucleotide linkage modifications at position 21 and 22 of the sense strand (counting from the 5′-end), and one phosphorothioate internucleotide linkage modification at positions 1 and one phosphorothioate internucleotide linkage modification at position 21 of the antisense strand (counting from the 5′-end).

[0103] In some embodiments, the dsRNA molecule of the invention further comprises one phosphorothioate internucleotide linkage modification at position 1, and one phosphorothioate internucleotide linkage modification at position 21 of the sense strand (counting from the 5′-end), and two phosphorothioate internucleotide linkage modifications at positions 1 and 2 and two phosphorothioate internucleotide linkage modifications at positions 21 and 22 the antisense strand (counting from the 5′-end).

[0104] In some embodiments, the dsRNA molecule of the invention further comprises two phosphorothioate internucleotide linkage modifications at position 1 and 2, and two phosphorothioate internucleotide linkage modifications at position 22 and 23 of the sense strand (counting from the 5′-end), and one phosphorothioate internucleotide linkage modification at positions 1 and one phosphorothioate internucleotide linkage modification at position 21 of the antisense strand (counting from the 5′-end).

[0105] In some embodiments, the dsRNA molecule of the invention further comprises one phosphorothioate internucleotide linkage modification at position 1, and one phosphorothioate internucleotide linkage modification at position 21 of the sense strand (counting from the 5′-end), and two phosphorothioate internucleotide linkage modifications at positions 1 and 2 and two phosphorothioate internucleotide linkage modifications at positions 22 and 23 the antisense strand (counting from the 5′-end).

[0106] In some embodiments, the sense strand comprises at least two phosphorothioate internucleotide linkages between the first five nucleotides counting from the 5′ end of the sense strand. For example, the sense strand comprises phosphorothioate linkages between nucleotides 1 and 2, and between nucleotides 2 and 3, counting from 5′-end of the sense strand.

[0107] In some embodiments, the antisense strand comprises at least two phosphorothioate internucleotide linkages between the first five nucleotides counting from the 5′-end of the antisense strand. For example, the antisense strand comprises phosphorothioate linkages between nucleotides 1 and 2, and between nucleotides 2 and 3, counting from 5′-end of the antisense strand.

[0108] In some embodiments, the antisense strand comprises at least two phosphorothioate internucleotide linkages between the first five nucleotides counting from the 3′ end of the antisense strand. For example, the antisense strand comprises phosphorothioate linkages between nucleotides n and n-1, and between nucleotides n-1 and n-2, where n is length of the antisense strand, i.e, number of nucleotides in the antisense strand. In other words, the antisense strand comprises phosphorothioate linkages between nucleotides 1 and 2, and between nucleotides 2 and 3, counting from 3′-end of the antisense strand.

[0109] In some embodiments, the antisense strand comprises at least two phosphorothioate internucleotide linkages between the first five nucleotides counting from the 5′-end of the antisense strand and at least two phosphorothioate internucleotide linkages between the first five nucleotides counting from the 5′-end of the antisense strand. For example, the antisense strand comprises phosphorothioate linkages between nucleotides 1 and 2, and between nucleotides 2 and 3, counting from 5′-end of the antisense strand and between nucleotides 1 and 2, and between nucleotides 2 and 3, counting from 3′-end of the antisense strand.

[0110] In some embodiments, the sense strand comprises at least two phosphorothioate internucleotide linkages between the first five nucleotides counting from the 5′ end of the sense strand and the antisense strand comprises at least two phosphorothioate internucleotide linkages between the first five nucleotides counting from the 5′-end of the antisense strand. For example, the sense strand comprises phosphorothioate linkages between nucleotides 1 and 2, and between nucleotides 2 and 3, counting from 5′-end of the sense strand, and the antisense strand comprises phosphorothioate linkages between nucleotides 1 and 2, and between nucleotides 2 and 3, counting from 5′-end of the antisense strand.

[0111] In some embodiments, the sense strand comprises at least two phosphorothioate internucleotide linkages between the first five nucleotides counting from the 5′ end of the sense strand and the antisense strand comprises at least two phosphorothioate internucleotide linkages between the first five nucleotides counting from the 3′-end of the antisense strand. For example, the sense strand comprises phosphorothioate linkages between nucleotides 1 and 2, and between nucleotides 2 and 3, counting from 5′-end of the sense strand, and the antisense strand comprises phosphorothioate linkages between nucleotides 1 and 2, and between nucleotides 2 and 3, counting from 3′-end of the antisense strand.

[0112] In some embodiments, compound of the invention comprises a pattern of backbone chiral centers. In some embodiments, a common pattern of backbone chiral centers comprises at least 5 internucleotidic linkages in the Sp configuration. In some embodiments, a common pattern of backbone chiral centers comprises at least 6 internucleotidic linkages in the Sp configuration. In some embodiments, a common pattern of backbone chiral centers comprises at least 7 internucleotidic linkages in the Sp configuration. In some embodiments, a common pattern of backbone chiral centers comprises at least 8 internucleotidic linkages in the Sp configuration. In some embodiments, a common pattern of backbone chiral centers comprises at least 9 internucleotidic linkages in the Sp configuration. In some embodiments, a common pattern of backbone chiral centers comprises at least 10 internucleotidic linkages in the Sp configuration. In some embodiments, a common pattern of backbone chiral centers comprises at least 11 internucleotidic linkages in the Sp configuration. In some embodiments, a common pattern of backbone chiral centers comprises at least 12 internucleotidic linkages in the Sp configuration. In some embodiments, a common pattern of backbone chiral centers comprises at least 13 internucleotidic linkages in the Sp configuration. In some embodiments, a common pattern of backbone chiral centers comprises at least 14 internucleotidic linkages in the Sp configuration. In some embodiments, a common pattern of backbone chiral centers comprises at least 15 internucleotidic linkages in the Sp configuration. In some embodiments, a common pattern of backbone chiral centers comprises at least 16 internucleotidic linkages in the Sp configuration. In some embodiments, a common pattern of backbone chiral centers comprises at least 17 internucleotidic linkages in the Sp configuration. In some embodiments, a common pattern of backbone chiral centers comprises at least 18 internucleotidic linkages in the Sp configuration. In some embodiments, a common pattern of backbone chiral centers comprises at least 19 internucleotidic linkages in the Sp configuration. In some embodiments, a common pattern of backbone chiral centers comprises no more than 8 internucleotidic linkages in the Rp configuration. In some embodiments, a common pattern of backbone chiral centers comprises no more than 7 internucleotidic linkages in the Rp configuration. In some embodiments, a common pattern of backbone chiral centers comprises no more than 6 internucleotidic linkages in the Rp configuration. In some embodiments, a common pattern of backbone chiral centers comprises no more than 5 internucleotidic linkages in the Rp configuration. In some embodiments, a common pattern of backbone chiral centers comprises no more than 4 internucleotidic linkages in the Rp configuration. In some embodiments, a common pattern of backbone chiral centers comprises no more than 3 internucleotidic linkages in the Rp configuration. In some embodiments, a common pattern of backbone chiral centers comprises no more than 2 internucleotidic linkages in the Rp configuration. In some embodiments, a common pattern of backbone chiral centers comprises no more than 1 internucleotidic linkages in the Rp configuration. In some embodiments, a common pattern of backbone chiral centers comprises no more than 8 internucleotidic linkages which are not chiral (as a non-limiting example, a phosphodiester). In some embodiments, a common pattern of backbone chiral centers comprises no more than 7 internucleotidic linkages which are not chiral. In some embodiments, a common pattern of backbone chiral centers comprises no more than 6 internucleotidic linkages which are not chiral. In some embodiments, a common pattern of backbone chiral centers comprises no more than 5 internucleotidic linkages which are not chiral. In some embodiments, a common pattern of backbone chiral centers comprises no more than 4 internucleotidic linkages which are not chiral. In some embodiments, a common pattern of backbone chiral centers comprises no more than 3 internucleotidic linkages which are not chiral. In some embodiments, a common pattern of backbone chiral centers comprises no more than 2 internucleotidic linkages which are not chiral. In some embodiments, a common pattern of backbone chiral centers comprises no more than 1 internucleotidic linkages which are not chiral. In some embodiments, a common pattern of backbone chiral centers comprises at least 10 internucleotidic linkages in the Sp configuration, and no more than 8 internucleotidic linkages which are not chiral. In some embodiments, a common pattern of backbone chiral centers comprises at least 11 internucleotidic linkages in the Sp configuration, and no more than 7 internucleotidic linkages which are not chiral. In some embodiments, a common pattern of backbone chiral centers comprises at least 12 internucleotidic linkages in the Sp configuration, and no more than 6 internucleotidic linkages which are not chiral. In some embodiments, a common pattern of backbone chiral centers comprises at least 13 internucleotidic linkages in the Sp configuration, and no more than 6 internucleotidic linkages which are not chiral. In some embodiments, a common pattern of backbone chiral centers comprises at least 14 internucleotidic linkages in the Sp configuration, and no more than 5 internucleotidic linkages which are not chiral. In some embodiments, a common pattern of backbone chiral centers comprises at least 15 internucleotidic linkages in the Sp configuration, and no more than 4 internucleotidic linkages which are not chiral. In some embodiments, the internucleotidic linkages in the Sp configuration are optionally contiguous or not contiguous. In some embodiments, the internucleotidic linkages in the Rp configuration are optionally contiguous or not contiguous. In some embodiments, the internucleotidic linkages which are not chiral are optionally contiguous or not contiguous.

[0113] In some embodiments, compound of the invention comprises a block is a stereochemistry block. In some embodiments, a block is an Rp block in that each internucleotidic linkage of the block is Rp. In some embodiments, a 5′-block is an Rp block. In some embodiments, a 3′-block is an Rp block. In some embodiments, a block is an Sp block in that each internucleotidic linkage of the block is Sp. In some embodiments, a 5′-block is an Sp block. In some embodiments, a 3′-block is an Sp block. In some embodiments, provided oligonucleotides comprise both Rp and Sp blocks. In some embodiments, provided oligonucleotides comprise one or more Rp but no Sp blocks. In some embodiments, provided oligonucleotides comprise one or more Sp but no Rp blocks. In some embodiments, provided oligonucleotides comprise one or more PO blocks wherein each internucleotidic linkage in a natural phosphate linkage.

[0114] In some embodiments, compound of the invention comprises a 5′-block is an Sp block wherein each sugar moiety comprises a 2′-fluoro modification. In some embodiments, a 5′-block is an Sp block wherein each of internucleotidic linkage is a modified internucleotidic linkage and each sugar moiety comprises a 2′-fluoro modification. In some embodiments, a 5′-block is an Sp block wherein each of internucleotidic linkage is a phosphorothioate linkage and each sugar moiety comprises a 2′-fluoro modification. In some embodiments, a 5′-block comprises 4 or more nucleoside units. In some embodiments, a 5′-block comprises 5 or more nucleoside units. In some embodiments, a 5′-block comprises 6 or more nucleoside units. In some embodiments, a 5′-block comprises 7 or more nucleoside units. In some embodiments, a 3′-block is an Sp block wherein each sugar moiety comprises a 2′-fluoro modification. In some embodiments, a 3′-block is an Sp block wherein each of internucleotidic linkage is a modified internucleotidic linkage and each sugar moiety comprises a 2′-fluoro modification. In some embodiments, a 3′-block is an Sp block wherein each of internucleotidic linkage is a phosphorothioate linkage and each sugar moiety comprises a 2′-fluoro modification. In some embodiments, a 3′-block comprises 4 or more nucleoside units. In some embodiments, a 3′-block comprises 5 or more nucleoside units. In some embodiments, a 3′-block comprises 6 or more nucleoside units. In some embodiments, a 3′-block comprises 7 or more nucleoside units.

[0115] In some embodiments, compound of the invention comprises a type of nucleoside in a region or an oligonucleotide is followed by a specific type of internucleotidic linkage, e.g., natural phosphate linkage, modified internucleotidic linkage, Rp chiral internucleotidic linkage, Sp chiral internucleotidic linkage, etc. In some embodiments, A is followed by Sp. In some embodiments, A is followed by Rp. In some embodiments, A is followed by natural phosphate linkage (PO). In some embodiments, U is followed by Sp. In some embodiments, U is followed by Rp. In some embodiments, U is followed by natural phosphate linkage (PO). In some embodiments, C is followed by Sp. In some embodiments, C is followed by Rp. In some embodiments, C is followed by natural phosphate linkage (PO). In some embodiments, G is followed by Sp. In some embodiments, G is followed by Rp. In some embodiments, G is followed by natural phosphate linkage (PO). In some embodiments, C and U are followed by Sp. In some embodiments, C and U are followed by Rp. In some embodiments, C and U are followed by natural phosphate linkage (PO). In some embodiments, A and G are followed by Sp. In some embodiments, A and G are followed by Rp.

[0116] Various publications describe multimeric siRNAs which can all be used with the dsRNA of the invention. Such publications include WO2007/091269, U.S. Pat. No. 7,858,769, WO2010/141511, WO2007/117686, WO2009/014887 and WO2011/031520 which are hereby incorporated by their entirely.

### Ligands

[0117] A wide variety of entities can be coupled to the dsRNA agents described herein. Preferred moieties are ligands, which are coupled, preferably covalently, either directly or indirectly via an intervening tether. Generally, a ligand alters the distribution, targeting or lifetime of the molecule, e.g., a dsRNA described herein, into which it is incorporated. In some embodiments a ligand provides an enhanced affinity for a selected target, e.g., molecule, cell or cell type, compartment, receptor e.g., a cellular or organ compartment, tissue, organ or region of the body, as, e.g., compared to a species absent such a ligand. Ligands providing enhanced affinity for a selected target are also termed targeting ligands herein.

[0118] Some ligands can have endosomolytic properties. The endosomolytic ligands promote the lysis of the endosome and/or transport of the composition of the invention, or its components, from the endosome to the cytoplasm of the cell. The endosomolytic ligand may be a polyanionic peptide or peptidomimetic which shows pH-dependent membrane activity and fusogenicity. In some embodiments, the endosomolytic ligand assumes its active conformation at endosomal pH. The “active” conformation is that conformation in which the endosomolytic ligand promotes lysis of the endosome and/or transport of the composition of the invention, or its components, from the endosome to the cytoplasm of the cell. Exemplary endosomolytic ligands include the GALA peptide (Subbarao et al., Biochemistry, 1987, 26:2964-2972, which is incorporated by reference in its entirety), the EALA peptide (Vogel et al., J. Am. Chem. Soc., 1996, 118:1581-1586, which is incorporated by reference in its entirety), and their derivatives (Turk et al., Biochem. Biophys. Acta, 2002, 1559:56-68, which is incorporated by reference in its entirety). In some embodiments, the endosomolytic component may contain a chemical group (e.g., an amino acid) which will undergo a change in charge or protonation in response to a change in pH. The endosomolytic component may be linear or branched.

[0119] Ligands can improve transport, hybridization, and specificity properties and can also improve nuclease resistance of the resultant natural or modified oligoribonucleotide, or a polymeric molecule comprising any combination of monomers described herein and/or natural or modified ribonucleotides.

[0120] Ligands in general can include therapeutic modifiers, e.g., for enhancing uptake; diagnostic compounds or reporter groups e.g., for monitoring distribution; cross-linking agents; and nuclease-resistance conferring moieties. General examples include lipids, steroids, vitamins, sugars, proteins, peptides, polyamines, and peptide mimics.

[0121] Ligands can include a naturally occurring substance, such as a protein (e.g., human serum albumin (HSA), low-density lipoprotein (LDL), high-density lipoprotein (HDL), or globulin); a carbohydrate (e.g., a dextran, pullulan, chitin, chitosan, inulin, cyclodextrin or hyaluronic acid); or a lipid. The ligand may also be a recombinant or synthetic molecule, such as a synthetic polymer, e.g., a synthetic polyamino acid, an oligonucleotide (e.g. an aptamer). Examples of polyamino acids include polyamino acid is a polylysine (PLL), poly L-aspartic acid, poly L-glutamic acid, styrene-maleic acid anhydride copolymer, poly(L-lactide-co-glycolide) copolymer, divinyl ether-maleic anhydride copolymer, N-(2-hydroxypropyl) methacrylamide copolymer (HMPA), polyethylene glycol (PEG), polyvinyl alcohol (PVA), polyurethane, poly(2-ethylacryllic acid), N-isopropylacrylamide polymers, or polyphosphazine. Example of polyamines include: polyethylenimine, polylysine (PLL), spermine, spermidine, polyamine, pseudopeptide-polyamine, peptidomimetic polyamine, dendrimer polyamine, arginine, amidine, protamine, cationic lipid, cationic porphyrin, quaternary salt of a polyamine, or an alpha helical peptide.

[0122] Ligands can also include targeting groups, e.g., a cell or tissue targeting agent, e.g., a lectin, glycoprotein, lipid or protein, e.g., an antibody, nanobody, or portion of an antibody of nanobody that binds to a specified cell type such as a kidney cell or a cell of the blood-brain barrier.

[0123] A targeting group can be a thyrotropin, melanotropin, lectin, glycoprotein, surfactant protein A, Mucin carbohydrate, multivalent lactose, multivalent galactose, N-acetyl-galactosamine, N-acetyl-glucosamine multivalent mannose, multivalent fucose, glycosylated polyamino acids, multivalent galactose, transferrin-targeting group, bisphosphonate, polyglutamate, polyaspartate, a lipid, cholesterol, a steroid, bile acid, folate, vitamin B12, biotin, an RGD peptide, an RGD peptide mimetic or an aptamer.

[0124] Other examples of ligands include dyes, intercalating agents (e.g. acridines), cross-linkers (e.g. psoralen, mitomycin C), porphyrins (TPPC4, texaphyrin, Sapphyrin), polycyclic aromatic hydrocarbons (e.g., phenazine, dihydrophenazine), artificial endonucleases or a chelating agent (e.g. EDTA), lipophilic molecules, e.g., cholesterol, cholic acid, adamantane acetic acid, 1-pyrene butyric acid, dihydrotestosterone, 1,3-Bis —O (hexadecyl)glycerol, geranyloxyhexyl group, hexadecylglycerol, borneol, menthol, 1,3-propanediol, heptadecyl group, palmitic acid, myristic acid, O3-(oleoyl) lithocholic acid, O3-(oleoyl) cholenic acid, dimethoxytrityl, or phenoxazine) and peptide conjugates (e.g., antennapedia peptide, Tat peptide), alkylating agents, phosphate, amino, mercapto, PEG (e.g., PEG-40K), MPEG, [MPEG]₂, polyamino, alkyl, substituted alkyl, radiolabeled markers, enzymes, haptens (e.g. biotin), transport/absorption facilitators (e.g., aspirin, vitamin E, folic acid), synthetic ribonucleases (e.g., imidazole, bisimidazole, histamine, imidazole clusters, acridine-imidazole conjugates, Eu3+ complexes of tetraazamacrocycles), dinitrophenyl, HRP, or AP.

[0125] Ligands can be proteins, e.g., glycoproteins, or peptides, e.g., molecules having a specific affinity for a co-ligand, or antibodies e.g., an antibody, that binds to a specified cell type such as a cancer cell, endothelial cell, or bone cell. Ligands may also include hormones and hormone receptors. They can also include non-peptide species, such as lipids, lectins, carbohydrates, vitamins, cofactors, multivalent lactose, multivalent galactose, N-acetyl-galactosamine, N-acetyl-glucosamine multivalent mannose, multivalent fucose, or aptamers. The ligand can be, for example, a lipopolysaccharide, an activator of p38 MAP kinase, or an activator of NF-κB.

[0126] The ligand can be a substance, e.g., a drug, which can increase the uptake of the iRNA agent into the cell, for example, by disrupting the cell's cytoskeleton, e.g., by disrupting the cell's microtubules, microfilaments, and/or intermediate filaments. The drug can be, for example, taxon, vincristine, vinblastine, cytochalasin, nocodazole, japlakinolide, latrunculin A, phalloidin, swinholide A, indanocine, or myoservin.

[0127] The ligand can increase the uptake of the dsRNA into the cell by activating an inflammatory response, for example. Exemplary ligands that would have such an effect include tumor necrosis factor alpha (TNF-alpha), interleukin-1 beta, or gamma interferon.

[0128] In some embodiments, the ligand is a lipid or lipid-based molecule. Such a lipid or lipid-based molecule preferably binds a serum protein, e.g., human serum albumin (HSA). An HSA binding ligand allows for distribution of the conjugate to a target tissue, e.g., a non-kidney target tissue of the body. For example, the target tissue can be the liver, including parenchymal cells of the liver. Other molecules that can bind HSA can also be used as ligands. For example, naproxen or aspirin can be used. A lipid or lipid-based ligand can (a) increase resistance to degradation of the conjugate, (b) increase targeting or transport into a target cell or cell membrane, and/or (c) can be used to adjust binding to a serum protein, e.g., HSA. A lipid based ligand can be used to modulate, e.g., control the binding of the conjugate to a target tissue. For example, a lipid or lipid-based ligand that binds to HSA more strongly will be less likely to be targeted to the kidney and therefore less likely to be cleared from the body. A lipid or lipid-based ligand that binds to HSA less strongly can be used to target the conjugate to the kidney.

[0129] In a preferred embodiment, the lipid based ligand binds HSA. Preferably, it binds HSA with a sufficient affinity such that the conjugate will be preferably distributed to a non-kidney tissue. However, it is preferred that the affinity not be so strong that the HSA-ligand binding cannot be reversed.

[0130] In another preferred embodiment, the lipid based ligand binds HSA weakly or not at all, such that the conjugate will be preferably distributed to the kidney. Other moieties that target to kidney cells can also be used in place of or in addition to the lipid based ligand.

[0131] In some embodiments, the ligand is a moiety, e.g., a vitamin, which is taken up by a target cell, e.g., a proliferating cell. These are particularly useful for treating disorders characterized by unwanted cell proliferation, e.g., of the malignant or non-malignant type, e.g., cancer cells. Exemplary vitamins include vitamin A, E, and K. Other exemplary vitamins include B vitamins, e.g., folic acid, B12, riboflavin, biotin, pyridoxal or other vitamins or nutrients taken up by cancer cells. Also included are HAS, low density lipoprotein (LDL) and high-density lipoprotein (HDL).

[0132] In another aspect, the ligand is a cell-permeation agent, preferably a helical cell-permeation agent. Preferably, the agent is amphipathic. An exemplary agent is a peptide such as tat or antennapedia. If the agent is a peptide, it can be modified, including a peptidylmimetic, invertomers, non-peptide or pseudo-peptide linkages, and use of D-amino acids. The helical agent is preferably an alpha-helical agent, which preferably has a lipophilic and a lipophobic phase.

[0133] The ligand can be a peptide or peptidomimetic. A peptidomimetic (also referred to herein as an oligopeptidomimetic) is a molecule capable of folding into a defined three-dimensional structure similar to a natural peptide. The peptide or peptidomimetic moiety can be about 5-50 amino acids long, e.g., about 5, 10, 15, 20, 25, 30, 35, 40, 45, or 50 amino acids long. A peptide or peptidomimetic can be, for example, a cell permeation peptide, cationic peptide, amphipathic peptide, or hydrophobic peptide (e.g., consisting primarily of Tyr, Trp or Phe). The peptide moiety can be a dendrimer peptide, constrained peptide or cross-linked peptide. In another alternative, the peptide moiety can include a hydrophobic membrane translocation sequence (MTS). An exemplary hydrophobic MTS-containing peptide is RFGF having the amino acid sequence AAVALLPAVLLALLAP(SEQ ID NO: 1). An RFGF analogue (e.g., amino acid sequence AALLPVLLAAP(SEQ ID NO: 2)) containing a hydrophobic MTS can also be a targeting moiety. The peptide moiety can be a “delivery” peptide, which can carry large polar molecules including peptides, oligonucleotides, and protein across cell membranes. For example, sequences from the HIV Tat protein (GRKKRRQRRRPPQ (SEQ ID NO: 3)) and the Drosophila Antennapedia protein (RQIKIWFQNRRMKWKK (SEQ ID NO: 4) have been found to be capable of functioning as delivery peptides. A peptide or peptidomimetic can be encoded by a random sequence of DNA, such as a peptide identified from a phage-display library, or one-bead-one-compound (OBOC) combinatorial library (Lam et al., Nature, 354:82-94, 1991, which is incorporated by reference in its entirety). Preferably the peptide or peptidomimetic tethered to an iRNA agent via an incorporated monomer unit is a cell targeting peptide such as an arginine-glycine-aspartic acid (RGD)-peptide, or RGD mimic. A peptide moiety can range in length from about 5 amino acids to about 40 amino acids. The peptide moieties can have a structural modification, such as to increase stability or direct conformational properties. Any of the structural modifications described below can be utilized. An RGD peptide moiety can be used to target a tumor cell, such as an endothelial tumor cell or a breast cancer tumor cell (Zitzmann et al., Cancer Res., 62:5139-43, 2002, which is incorporated by reference in its entirety). An RGD peptide can facilitate targeting of an iRNA agent to tumors of a variety of other tissues, including the lung, kidney, spleen, or liver (Aoki et al., Cancer Gene Therapy 8:783-787, 2001, which is incorporated by reference in its entirety). Preferably, the RGD peptide will facilitate targeting of an iRNA agent to the kidney. The RGD peptide can be linear or cyclic, and can be modified, e.g., glycosylated or methylated to facilitate targeting to specific tissues. For example, a glycosylated RGD peptide can deliver an iRNA agent to a tumor cell expressing ανβ₃(Haubner et al., Jour. Nucl. Med., 42:326-336, 2001, which is incorporated by reference in its entirety). Peptides that target markers enriched in proliferating cells can be used. For example, RGD containing peptides and peptidomimetics can target cancer cells, in particular cells that exhibit an integrin. Thus, one could use RGD peptides, cyclic peptides containing RGD, RGD peptides that include D-amino acids, as well as synthetic RGD mimics. In addition to RGD, one can use other moieties that target the integrin ligand. Generally, such ligands can be used to control proliferating cells and angiogenesis. Preferred conjugates of this type ligands that targets PECAM-1, VEGF, or other cancer gene, e.g., a cancer gene described herein.

[0134] A “cell permeation peptide” is capable of permeating a cell, e.g., a microbial cell, such as a bacterial or fungal cell, or a mammalian cell, such as a human cell. A microbial cell-permeating peptide can be, for example, an α-helical linear peptide (e.g., LL-37 or Ceropin P1), a disulfide bond-containing peptide (e.g., α-defensin, β-defensin or bactenecin), or a peptide containing only one or two dominating amino acids (e.g., PR-39 or indolicidin). A cell permeation peptide can also include a nuclear localization signal (NLS). For example, a cell permeation peptide can be a bipartite amphipathic peptide, such as MPG, which is derived from the fusion peptide domain of HIV-1 gp41 and the NLS of SV40 large T antigen (Simeoni et al., Nucl. Acids Res. 31:2717-2724, 2003, which is incorporated by reference in its entirety).

[0135] In some embodiments, a targeting peptide can be an amphipathic α-helical peptide. Exemplary amphipathic α-helical peptides include, but are not limited to, cecropins, lycotoxins, paradaxins, buforin, CPF, bombinin-like peptide (BLP), cathelicidins, ceratotoxins, S. clava peptides, hagfish intestinal antimicrobial peptides (HFIAPs), magainines, brevinins-2, dermaseptins, melittins, pleurocidin, H₂A peptides, Xenopus peptides, esculentinis-1, and caerins. A number of factors will preferably be considered to maintain the integrity of helix stability. For example, a maximum number of helix stabilization residues will be utilized (e.g., leu, ala, or lys), and a minimum number of helix destabilization residues will be utilized (e.g., proline, or cyclic monomeric units. The capping residue will be considered (for example Gly is an exemplary N-capping residue and/or C-terminal amidation can be used to provide an extra H-bond to stabilize the helix. Formation of salt bridges between residues with opposite charges, separated by i±3, or i±4 positions can provide stability. For example, cationic residues such as lysine, arginine, homo-arginine, ornithine or histidine can form salt bridges with the anionic residues glutamate or aspartate.

[0136] Peptide and peptidomimetic ligands include those having naturally occurring or modified peptides, e.g., D or L peptides; a, B, or y peptides; N-methyl peptides; azapeptides; peptides having one or more amide, i.e., peptide, linkages replaced with one or more urea, thiourea, carbamate, or sulfonyl urea linkages; or cyclic peptides.

[0137] The targeting ligand can be any ligand that is capable of targeting a specific receptor. Examples are: folate, GalNAc, galactose, mannose, mannose-6P, clusters of sugars such as GalNAc cluster, mannose cluster, galactose cluster, or an aptamer. A cluster is a combination of two or more sugar units. The targeting ligands also include integrin receptor ligands, Chemokine receptor ligands, transferrin, biotin, serotonin receptor ligands, PSMA, endothelin, GCPII, somatostatin, LDL and HDL ligands. The ligands can also be based on nucleic acid, e.g., an aptamer. The aptamer can be unmodified or have any combination of modifications disclosed herein.

[0138] Endosomal release agents include imidazoles, poly or oligoimidazoles, PEIs, peptides, fusogenic peptides, polycarboxylates, polycations, masked oligo or poly cations or anions, acetals, polyacetals, ketals/polyketals, orthoesters, polymers with masked or unmasked cationic or anionic charges, dendrimers with masked or unmasked cationic or anionic charges.

[0139] PK modulator stands for pharmacokinetic modulator. PK modulator include lipophiles, bile acids, steroids, phospholipid analogues, peptides, protein binding agents, PEG, vitamins etc. Exemplary PK modulator include, but are not limited to, cholesterol, fatty acids, cholic acid, lithocholic acid, dialkylglycerides, diacylglyceride, phospholipids, sphingolipids, naproxen, ibuprofen, vitamin E, biotin etc. Oligonucleotides that comprise a number of phosphorothioate linkages are also known to bind to serum protein, thus short oligonucleotides, e.g. oligonucleotides of about 5 bases, 10 bases, 15 bases or 20 bases, comprising multiple of phosphorothioate linkages in the backbone are also amenable to the present invention as ligands (e.g. as PK modulating ligands).

[0140] In addition, aptamers that bind serum components (e.g. serum proteins) are also amenable to the present invention as PK modulating ligands.

[0141] Other ligand conjugates amenable to the invention are described in U.S. patent application Ser. No. 10/916,185, filed Aug. 10, 2004; U.S. Ser. No. 10/946,873, filed Sep. 21, 2004; USSN: U.S. Ser. No. 10/833,934, filed Aug. 3, 2007; USSN: U.S. Ser. No. 11/115,989 filed Apr. 27, 2005 and USSN: U.S. Ser. No. 11/944,227 filed Nov. 21, 2007, which are incorporated by reference in their entireties for all purposes.

[0142] In some embodiments, the dsRNA molecule can comprise two or more, e.g., 2, 3, 4 or 5 ligands. When two or more ligands are present, the ligands can all have same properties, all have different properties or some ligands have the same properties while others have different properties. For example, a ligand can have targeting properties, have endosomolytic activity or have PK modulating properties. In a preferred embodiment, all the ligands have different properties.

[0143] In some embodiments the dsRNA molecule comprises two ligands. For example, the sense strand of the dsRNA molecule comprises a first ligand attached at the 3′-end of the sense strand and a second ligand attached at the 5′-end of the sense strand. In some embodiments, the dsRNA molecule comprises two ligands linked to the sense strand, where the first ligand comprises an inverted abasic nucleotide (i.e., an abasic nucleotide linked via 3′->3′ linkage) and the second ligand comprises an ASGPR ligand.

[0144] Ligands can be coupled to the dsRNA at various places, for example, 3′-end, 5′-end, and/or at an internal position of the sense and/or antisense strand. In preferred embodiments, the ligand is attached to the sense and/or antisense strand of the dsRNA via a linker or tether. The ligand or tethered ligand can be present on a monomer when said monomer is incorporated into the growing strand. In some embodiments, the ligand may be incorporated via coupling to a “precursor” monomer after said “precursor” monomer has been incorporated into the growing strand. For example, a monomer having, e.g., an amino-terminated tether (i.e., having no associated ligand), e.g., TAP-(CH2),NH2 may be incorporated into a growing oligonucleotide strand. In a subsequent operation, i.e., after incorporation of the precursor monomer into the strand, a ligand having an electrophilic group, e.g., a pentafluorophenyl ester or aldehyde group, can subsequently be attached to the precursor monomer by coupling the electrophilic group of the ligand with the terminal nucleophilic group of the precursor monomer's tether.

[0145] In another example, a monomer having a chemical group suitable for taking part in Click Chemistry reaction may be incorporated e.g., an azide or alkyne terminated tether/linker. In a subsequent operation, i.e., after incorporation of the precursor monomer into the strand, a ligand having complementary chemical group, e.g. an alkyne or azide can be attached to the precursor monomer by coupling the alkyne and the azide together.

[0146] The ligands can be attached to one or both strands. In some embodiments, a dsRNA described herein comprises a ligand conjugated to the sense strand. In some embodiments, a dsRNA described herein comprises a ligand conjugated to the antisense strand.

[0147] In some embodiments, the ligand is conjugated to the sense strand. As described herein, the ligand can be conjugated at the 3′-end, 5′-end or at an internal position of the sense strand. In some embodiments, the ligand is conjugated to the 3′-end of the sense strand. In some embodiments, the ligand is conjugated to the 5′-end of the sense strand. In some embodiments, the ligand is conjugated at an internal position of the sense strand. In other words, the ligand is conjugated to a non-terminal nucleotide of the sense strand. It is noted that the ligand can be conjugated to a nucleobase, sugar moiety or internucleotide linkage of the sense strand.

[0148] In some embodiments, the ligand is conjugated at the 2′-position of a nucleotide in the sense strand. For example, the ligand is conjugated at the 2′-position of a nucleotide at an internal, i.e., non-terminal position of the sense strand.

[0149] In some embodiments, ligand can be conjugated to nucleobases, sugar moieties, or internucleosidic linkages of nucleic acid molecules. Conjugation to purine nucleobases or derivatives thereof can occur at any position including, endocyclic and exocyclic atoms. In some embodiments, the 2-, 6-, 7-, or 8-positions of a purine nucleobase are attached to a conjugate moiety. Conjugation to pyrimidine nucleobases or derivatives thereof can also occur at any position. In some embodiments, the 2-, 5-, and 6-positions of a pyrimidine nucleobase can be substituted with a conjugate moiety. Conjugation to sugar moieties of nucleosides can occur at any carbon atom. Example carbon atoms of a sugar moiety that can be attached to a conjugate moiety include the 2′, 3′, and 5′ carbon atoms. The 1′ position can also be attached to a conjugate moiety, such as in an abasic residue. Internucleosidic linkages can also bear conjugate moieties. For phosphorus-containing linkages (e.g., phosphodiester, phosphorothioate, phosphorodithioate, phosphoroamidate, and the like), the conjugate moiety can be attached directly to the phosphorus atom or to an O, N, or S atom bound to the phosphorus atom. For amine-or amide-containing internucleosidic linkages (e.g., PNA), the conjugate moiety can be attached to the nitrogen atom of the amine or amide or to an adjacent carbon atom.

[0150] In some embodiments, the ligand is conjugated to the sense strand. As described herein, the ligand can be conjugated at the 3′-end, 5′-end or at an internal position of the sense strand. In some embodiments, the ligand is conjugated to the 3′-end of the sense strand. Further, the ligand can be conjugated to a nucleobase, sugar moiety or internucleotide linkage of the sense strand.

[0151] Any suitable ligand in the field of RNA interference may be used, although the ligand is typically a carbohydrate e.g. monosaccharide (such as GalNAc), disaccharide, trisaccharide, tetrasaccharide, polysaccharide.

[0152] Linkers that conjugate the ligand to the nucleic acid include those discussed above. For example, the ligand can be one or more carbohydrates, e.g., GalNAc (N-acetylgalactosamine) derivatives attached through a monovalent, bivalent or trivalent branched linker.

[0153] In some embodiments, the dsRNA of the invention is conjugated to a bivalent and trivalent branched linkers include the structures shown in any of Formula (IV)-(VII):

[chemical structure]

wherein:
[0154] q^{2A}, q^{2B}, q^{3A}, q^{3B}, q^{4A}, q^{4B}, q^{5A}, q^{5B} and q^{5C} represent independently for each occurrence 0-20 and wherein the repeating unit can be the same or different;
[0155] P^{2A}, P^{2B}, P^{3A}, P^{3B}, P^{4A}, P^{4B}, P^{5A}, P^{5B}, P^{5C}, T^{2A}, T^{2B}, T^{3A}, T^{3B}, T^{4A}, T^{4B}, T^{5A}, T^{5B}, T^{5C} are each independently for each occurrence absent, CO, NH, O, S, OC(O), NHC(O), CH₂, CH₂NH or CH₂O;
[0156] Q^{2A}, Q^{2B}, Q^{3A}, Q^{3B}, Q^{4A}, Q^{4B}, Q^{5A}, Q^{5B}, Q^{5C} are independently for each occurrence absent, alkylene, substituted alkylene wherein one or more methylenes can be interrupted or terminated by one or more of O, S, S(O), SO₂, N(RN), C(R′)═C(R″), C═C or C(O);
[0157] R^{2A}, R^{2B}, R^{3A}, R^{3B}, R^{4A}, R^{4B}, R^{5A}, R^{5B}, R^{5C} are each independently for each occurrence absent, NH, O, S, CH₂, C(O) O, C(O) NH, NHCH(R^{a}) C(O), —C(O)—CH(R^{a})—NH—, CO, CH═N—O,

[chemical structure]

or heterocyclyl;
[0158] L^{2A}, L^{2B}, L^{3A}, L^{3B}, L^{4A}, L^{4B}, L^{5A}, L^{5B} and L^{5C} represent the ligand; i.e. each independently for each occurrence a monosaccharide (such as GalNAc), disaccharide, trisaccharide, tetrasaccharide, oligosaccharide, or polysaccharide; and
[0159] R^{a} is H or amino acid side chain.

[0160] Trivalent conjugating GalNAc derivatives are particularly useful for use with dsRNA agents described herein for inhibiting the expression of a target gene, such as those of Formula (VII):

[chemical structure]

wherein L^{5A}, L^{5B} and L^{5C} represent a monosaccharide, such as GalNAc derivative.

[0161] Examples of suitable bivalent and trivalent branched linker groups conjugating GalNAc derivatives include, but are not limited to, the following compounds:

[chemical structure]

[chemical structure]

[0162] In some embodiments, a dsRNA described herein comprises Ligand 1, i.e., a ligand having the following structure:

[chemical structure]

[0163] In some embodiments, a dsRNA described herein comprises a ligand described in U.S. Pat. No. 5,994,517 or U.S. Pat. No. 6,906,182, content of each of which is incorporated herein by reference in its entirety.

[0164] In some embodiments, the ligand can be a tri-antennary ligand described in FIG. 3 of U.S. Pat. No. 6,906,182. For example, a dsRNA described herein can comprise a ligand selected from the following tri-antennary ligands:

[chemical structure]

[0165] In some embodiments of any one of the aspects, the antisense strand comprises a phosphoryl analog or phosphate mimic at the 5′-terminus. In some embodiments, the antisense strand comprises an alkenylphosphonates, i.e., a vinyl phosphonate at the 5′-terminus. For example, the antisense strand comprises a 5′-E-vinyl phosphonate.

[0166] In some embodiments, the antisense strand comprises a cyclopropylphosphonate at the

[chemical structure]

5′-terminus. For example, the antisense comprises at the 5′-terminus, where * is a bond to C5 position of the nucleotide at the 5′-terminus.

[0167] In some embodiments of any one of the aspects, at least one of the strands, e.g., the sense and/or the antisense strand of the double-stranded RNA comprises a monomer or ligand selected from the following:

[chemical structure]

where * is a bond to a 5′, 3′-terminal hydroxyl group of the strand;

[chemical structure]

where * is a bond to 2′-hydroxyl of a nucleotide in the strand;

[chemical structure]

where * is a bond to a 5′ or 3′-terminus of the strand;

[chemical structure]

where * is a bond to a 5′ or 3′-terminus of the strand;

[chemical structure]

where —O—* is a connection to a 5′ or 3′-terminus of the strand; and/or

[chemical structure]

where —P—* is a connection to a 5′ or 3′-hydroxyl group of the strand.

[0168] In some embodiments, the ligand comprises a lipophilic group. For example, the ligand can be a C₆₋₃₀aliphatic group or a C₁₀₋₃₀ aliphatic group. “Aliphatic” as used herein means a saturated or unsaturated and straight, branched, and/or cyclic hydrocarbon having the defined number of carbon atoms;l examples include alkyl, alkenyl, alkynyl, cycloalkyl, cycloalkylalkyl, cycloalkylalkenyl, and cycloalkylalkynyl, having the defined number of carbon atoms. In some embodiments, the ligand is a C₁₀₋₃₀alkyl group. For example, the ligand is a straight-chain or branched hexyl, octyl, decyl, dodecyl, tetradecyl, hexadecyl, octadecyl, icosyl, docosyl, or tetracosyl group. For example, the ligand is a straight-chain hexyl, octyl, decyl, dodecyl, tetradecyl, hexadecyl, octadecyl, icosyl, docosyl, or tetracosyl group. For example, the ligand is a straight-chain hexyl, octyl, decyl, dodecyl, hexadecyl, octadecyl, icosyl, or docosyl group. For example, the ligand is a straight-chain hexadecyl group. For example, the ligand is a straight-chain docosyl group.

[0169] In certain embodiments, the ligand is conjugated at the 2′-position of a nucleotide at an internal, i.e., non-terminal position of the sense strand and is a straight-chain or branched tetradecyl, hexadecyl, octadecyl, icosyl, docosyl, or tetracosyl group. For example, the ligand is conjugated at the 2′-position of a nucleotide at an internal, i.e., non-terminal position of the sense strand and is a straight-chain or branched hexyl, octyl, decyl, dodecyl, tetradecyl, hexadecyl, octadecyl, icosyl, docosyl, or tetracosyl group. For example, the ligand is conjugated at the 2′-position of a nucleotide at an internal, i.e., non-terminal position of the sense strand and is a straight-chain hexyl, octyl, decyl, dodecyl, tetradecyl, hexadecyl, octadecyl, icosyl, docosyl, or tetracosyl group. For example, the ligand is conjugated at the 2′-position of a nucleotide at an internal, i.e., non-terminal position of the sense strand and is a straight-chain hexadecyl, octadecyl, icosyl, or docosyl group.

[0170] The internal sense strand nucleoide position can be all positions except the three terminal positions from each end of the at sense strand. In some embodiments, the internal positions exclude a cleavage site region of the sense strand. In some embodiments, the internal positions exclude positions 9-12 or positions 11-13, counting from the 5′-end of the sense strand. For example, the internal nucleotide position can be one or more of positions 4-8 and 13-18 on the sense strand, such as one or more of positions 5, 6, 7, 15, and 17 on the sense strand counting from the 5′-end of the sense strand. In one embodiment, the internal nucleotide position can be one of positions 5, 6, 7, or 8 of the sense strand, counting from the 5′-end. For example, each of these embodiments, the internal nucleoide position is position 6 or 7 of the sense strand, counting from the 5′-end. For example, each of these embodiments, the internal nucleoide position is position 6 of the sense strand, counting from the 5′-end. For example, each of these embodiments, the internal nucleoide position is position 7 of the sense strand, counting from the 5′-end. In certain embodiments, the internal nucleoide comprising the ligand has the formula,

[chemical structure]

where B is a nucleotide base or a nucleotide base analog, optionally where B is adenine, guanine, cytosine, thymine or uracil.

[0171] In some embodiments, the ligand comprises an inverted nucleotide or an inverted abasic nucleotide. For example, the ligand comprises an abasic nucleotide linked via a 5′->5′ or 3′->3′ linkage to a strand of the dsRNA molecule. In some embodiments, the ligand comprises an abasic nucleotide linked via a 3′->3′ linkage to the 3′-end of the sense strand.

[0172] In other embodiments, the ligand comprises a lipophilic group that is comprises a steroidal fused ring system. For example, the ligand can comprise cholesterol or corticosterone. Examples of such ligands, include, for example,

[chemical structure]

For example, such ligands may be attached to the 5′ and/or 3′ ends of a strand of the dsRNA molecule. In some embodiments, the ligand may be attached to the 5′ or 3′-end of the sense strand. In some embodiments, the ligand may be attached to the 5′-end of the sense strand. In some embodiments, the ligand may be attached to the 3′-end of the sense strand. Attachment to the dsRNA molecule may be via a bond to the oxygen atom illustrated above having an open valence, or a bond formed with the 4-hydoxyl group of the pyrollidine ring.

[0173] The ligand may be attached to the polynucleotide via a carrier. The carriers include (i) at least one “backbone attachment point,” preferably two “backbone attachment points” and (ii) at least one “tethering attachment point.” A “backbone attachment point” as used herein refers to a functional group, e.g. a hydroxyl group, or generally, a bond available for, and that is suitable for incorporation of the carrier into the backbone, e.g., the phosphate, or modified phosphate, e.g., sulfur containing, backbone, of a ribonucleic acid. A “tethering attachment point” (TAP) in some embodiments refers to a constituent ring atom of the cyclic carrier, e.g., a carbon atom or a heteroatom (distinct from an atom which provides a backbone attachment point), that connects a selected moiety. The moiety can be, e.g., a carbohydrate, e.g. monosaccharide, disaccharide, trisaccharide, tetrasaccharide, oligosaccharide and polysaccharide. Optionally, the selected moiety is connected by an intervening tether to the cyclic carrier. Thus, the cyclic carrier will often include a functional group, e.g., an amino group, or generally, provide a bond, that is suitable for incorporation or tethering of another chemical entity, e.g., a ligand to the constituent ring.

[0174] In one embodiment the dsRNA molecule of the invention is conjugated to a ligand via a carrier, wherein the carrier can be cyclic group or acyclic group; preferably, the cyclic group is selected from pyrrolidinyl, pyrazolinyl, pyrazolidinyl, imidazolinyl, imidazolidinyl, piperidinyl, piperazinyl, [1,3]dioxolane, oxazolidinyl, isoxazolidinyl, morpholinyl, thiazolidinyl, isothiazolidinyl, quinoxalinyl, pyridazinonyl, tetrahydrofuryl and decalin; preferably, the acyclic group is selected from serinol backbone or diethanolamine backbone.

[0175] The ligand can be attached to the sense strand, antisense strand or both strands, at the 3′-end, 5′-end or both ends. For instance, the ligand can be conjugated to the sense strand, in particular, the 3′-end of the sense strand.

[0176] The ligand can be conjugated to the sense strand or the antisense strand via a linker comprising a cleavable group. A cleavable linking group is one which is sufficiently stable outside the cell, but which upon entry into a target cell is cleaved to release the two parts the linker is holding together. In a preferred embodiment of the dsRNA molecule according to the present invention, the cleavable linking group is cleaved at least 10 times or more, preferably at least 100 times faster in the target cell or under a first reference condition (which can, e.g., be selected to mimic or represent intracellular conditions) than in the blood of a subject, or under a second reference condition (which can, e.g., be selected to mimic or represent conditions found in the blood or serum).

[0177] Cleavable linking groups are susceptible to cleavage agents, e.g., pH, redox potential or the presence of degradative molecules. Generally, cleavage agents are more prevalent or found at higher levels or activities inside cells than in serum or blood. Examples of such degradative agents include: redox agents which are selected for particular substrates or which have no substrate specificity, including, e.g., oxidative or reductive enzymes or reductive agents such as mercaptans, present in cells, that can degrade a redox cleavable linking group by reduction; esterases; endosomes or agents that can create an acidic environment, e.g., those that result in a pH of five or lower; enzymes that can hydrolyze or degrade an acid cleavable linking group by acting as a general acid, peptidases (which can be substrate specific), and phosphatases.

[0178] A cleavable linkage group, such as a disulfide bond can be susceptible to pH. The pH of human serum is 7.4, while the average intracellular pH is slightly lower, ranging from about 7.1-7.3. Endosomes have a more acidic pH, in the range of 5.5-6.0, and lysosomes have an even more acidic pH at around 5.0. Some linkers will have a cleavable linking group that is cleaved at a preferred pH, thereby releasing the cationic lipid from the ligand inside the cell, or into the desired compartment of the cell.

[0179] A linker can include a cleavable linking group that is cleavable by a particular enzyme. The type of cleavable linking group incorporated into a linker can depend on the cell to be targeted.

[0180] For example, liver targeting ligands can be linked to the cationic lipids through a linker that includes an ester group. Liver cells are rich in esterases, and therefore the linker will be cleaved more efficiently in liver cells than in cell types that are not esterase-rich. Other cell-types rich in esterases include cells of the lung, renal cortex, and testis.

[0181] Linkers that contain peptide bonds can be used when targeting cell types rich in peptidases, such as liver cells and synoviocytes.

[0182] In general, the suitability of a candidate cleavable linking group can be evaluated by testing the ability of a degradative agent (or condition) to cleave the candidate linking group. It will also be desirable to also test the candidate cleavable linking group for the ability to resist cleavage in the blood or when in contact with other non-target tissue. Thus one can determine the relative susceptibility to cleavage between a first and a second condition, where the first is selected to be indicative of cleavage in a target cell and the second is selected to be indicative of cleavage in other tissues or biological fluids, e.g., blood or serum. The evaluations can be carried out in cell free systems, in cells, in cell culture, in organ or tissue culture, or in whole animals. It may be useful to make initial evaluations in cell-free or culture conditions and to confirm by further evaluations in whole animals. In preferred embodiments, useful candidate compounds are cleaved at least 2, 4, 10 or 100 times faster in the cell (or under in vitro conditions selected to mimic intracellular conditions) as compared to blood or serum (or under in vitro conditions selected to mimic extracellular conditions).

[0183] One class of cleavable linking groups is redox cleavable linking groups, which may be used in the dsRNA molecule according to the present invention that are cleaved upon reduction or oxidation. An example of reductively cleavable linking group is a disulfide linking group (—S—S—). To determine if a candidate cleavable linking group is a suitable “reductively cleavable linking group,” or for example is suitable for use with a particular iRNA moiety and particular targeting agent one can look to methods described herein. For example, a candidate can be evaluated by incubation with dithiothreitol (DTT), or other reducing agent using reagents know in the art, which mimic the rate of cleavage which would be observed in a cell, e.g., a target cell. The candidates can also be evaluated under conditions which are selected to mimic blood or serum conditions. In a preferred embodiment, candidate compounds are cleaved by at most 10% in the blood. In preferred embodiments, useful candidate compounds are degraded at least 2, 4, 10 or 100 times faster in the cell (or under in vitro conditions selected to mimic intracellular conditions) as compared to blood (or under in vitro conditions selected to mimic extracellular conditions). The rate of cleavage of candidate compounds can be determined using standard enzyme kinetics assays under conditions chosen to mimic intracellular media and compared to conditions chosen to mimic extracellular media.

[0184] Phosphate-based cleavable linking groups, which may be used in the dsRNA molecule according to the present invention, are cleaved by agents that degrade or hydrolyze the phosphate group. An example of an agent that cleaves phosphate groups in cells are enzymes such as phosphatases in cells. Examples of phosphate-based linking groups are —O—P(O)(ORk)—O—, —O—P(S)(ORk)—O—, —O—P(S)(SRk)—O—, —S—P(O)(ORk)—O—, —O—P(O)(ORk)—S—, —S—P(O)(ORk)—S—, —O—P(S)(ORk)—S—, —S—P(S)(ORk)—O—, —O—P(O)(Rk)—O—, —O—P(S)(Rk)—O—, —S—P(O)(Rk)—O—, —S—P(S)(Rk)—O—, —S—P(O)(Rk)—S—, —O—P(S)(Rk)—S—, wherein Rk at each occurrence can be, independently, hydrogen, C1-C20 alkyl, C1-C20 haloalkyl, C6-C10 aryl, C7-C12 aralkyl. Preferred embodiments are —O—P(O)(OH)—O—, —O—P(S)(OH)—O—, —O—P(S)(SH)—O—, —S—P(O)(OH)—O—, —O—P(O)(OH)—S—, —S—P(O)(OH)—S—, —O—P(S)(OH)—S—, —S—P(S)(OH)—O—, —O—P(O)(H)—O—, —O—P(S)(H)—O—, —S—P(O)(H)—O—, —S—P(S)(H)—O—, —S—P(O)(H)—S—, —O—P(S)(H)—S—. A preferred embodiment is —O—P(O)(OH)—O—. These candidates can be evaluated using methods analogous to those described above.

[0185] Acid cleavable linking groups, which may be used in the dsRNA molecule according to the present invention, are linking groups that are cleaved under acidic conditions. In preferred embodiments acid cleavable linking groups are cleaved in an acidic environment with a pH of about 6.5 or lower (e.g., about 6.0, 5.5, 5.0, or lower), or by agents such as enzymes that can act as a general acid. In a cell, specific low pH organelles, such as endosomes and lysosomes can provide a cleaving environment for acid cleavable linking groups. Examples of acid cleavable linking groups include but are not limited to hydrazones, esters, and esters of amino acids. Acid cleavable groups can have the general formula —C═NN—, C(O) O, or —OC(O). A preferred embodiment is when the carbon attached to the oxygen of the ester (the alkoxy group) is an aryl group, substituted alkyl group, or tertiary alkyl group such as dimethyl pentyl or t-butyl. These candidates can be evaluated using methods analogous to those described above.

[0186] Ester-based cleavable linking groups, which may be used in the dsRNA molecule according to the present invention, are cleaved by enzymes such as esterases and amidases in cells. Examples of ester-based cleavable linking groups include but are not limited to esters of alkylene, alkenylene and alkynylene groups. Ester cleavable linking groups have the general formula —C(O)O—, or —OC(O)—. These candidates can be evaluated using methods analogous to those described above.

[0187] Peptide-based cleavable linking groups, which may be used in the dsRNA molecule according to the present invention, are cleaved by enzymes such as peptidases and proteases in cells. Peptide-based cleavable linking groups are peptide bonds formed between amino acids to yield oligopeptides (e.g., dipeptides, tripeptides etc.) and polypeptides. Peptide-based cleavable groups do not include the amide group (—C(O) NH—). The amide group can be formed between any alkylene, alkenylene or alkynylene. A peptide bond is a special type of amide bond formed between amino acids to yield peptides and proteins. The peptide based cleavage group is generally limited to the peptide bond (i.e., the amide bond) formed between amino acids yielding peptides and proteins and does not include the entire amide functional group. Peptide-based cleavable linking groups have the general formula —NHCHR^{A}C(O) NHCHR^{B}C(O)—, where R^{A} and R^{B} are the R groups of the two adjacent amino acids. These candidates can be evaluated using methods analogous to those described above. As used herein, “carbohydrate” refers to a compound which is either a carbohydrate per se made up of one or more monosaccharide units having at least 6 carbon atoms (which may be linear, branched or cyclic) with an oxygen, nitrogen or sulfur atom bonded to each carbon atom; or a compound having as a part thereof a carbohydrate moiety made up of one or more monosaccharide units each having at least six carbon atoms (which may be linear, branched or cyclic), with an oxygen, nitrogen or sulfur atom bonded to each carbon atom. Representative carbohydrates include the sugars (mono-, di-, tri- and oligosaccharides containing from about 4-9 monosaccharide units), and polysaccharides such as starches, glycogen, cellulose and polysaccharide gums. Specific monosaccharides include C₅ and above (preferably C₅-C₈) sugars; di- and trisaccharides include sugars having two or three monosaccharide units (preferably C₅-C₈).

[0188] In some embodiments, the dsRNA molecule of the invention comprises one or more overhang regions and/or capping groups of dsRNA molecule at the 3′-end, or 5′-end or both ends of a strand. The overhang can be 1-10 nucleotides in length. For example, the overhang can be 1, 2, 3, 4, 5, 6, 7, 8, 9 or 10 nucleotides in length. In some embodiments, the overhang is 1-6 nucleotides in length, for instance 2-6 nucleotides in length, 1-5 nucleotides in length, 2-5 nucleotides in length, 1-4 nucleotides in length, 2-4 nucleotides in length, 1-3 nucleotides in length, 2-3 nucleotides in length, or 1-2 nucleotides in length. The overhangs can be the result of one strand being longer than the other, or the result of two strands of the same length being staggered. The overhang can form a mismatch with the target sequence or it can be complementary to the gene sequences being targeted or it can be the other sequence. The first and second strands can also be joined, e.g., by additional bases to form a hairpin, or by other non-base linkers.

[0189] In some embodiments, the nucleotides in the overhang region of the dsRNA molecule of the invention can each independently be a modified or unmodified nucleotide including, but not limited to 2′-sugar modified, such as, 2′-Fluoro 2′-O-methyl, thymidine (T), 2′-O-methoxyethyl-5-methyluridine, 2′-O-methoxyethyladenosine, 2′-O-methoxyethyl-5-methylcytidine, GNA, SNA, hGNA, hhGNA, mGNA, TNA, h′GNA, and any combinations thereof. For example, dTdT can be an overhang sequence for either end on either strand. The overhang can form a mismatch with the target mRNA or it can be complementary to the gene sequences being targeted or can be other sequence.

[0190] The 5′- or 3′-overhangs at the sense strand, antisense strand or both strands of the dsRNA molecule of the invention may be phosphorylated. In some embodiments, the overhang region contains two nucleotides having a phosphorothioate between the two nucleotides, where the two nucleotides can be the same or different. In some embodiments, the overhang is present at the 3′-end of the sense strand, antisense strand or both strands. In some embodiments, this 3′-overhang is present in the antisense strand. In some embodiments, this 3′-overhang is present in the sense strand.

[0191] The dsRNA molecule of the invention may comprise only a single overhang, which can strengthen the interference activity of the dsRNA, without affecting its overall stability. For example, the single-stranded overhang is located at the 3′-terminal end of the sense strand or, alternatively, at the 3′-terminal end of the antisense strand. The dsRNA can also have a blunt end, located at the 5′-end of the antisense strand (or the 3′-end of the sense strand) or vice versa.

[0192] Generally, the antisense strand of the dsRNA has a nucleotide overhang at the 3′-end, and the 5′-end is blunt. While not bound by theory, the asymmetric blunt end at the 5′-end of the antisense strand and 3′-end overhang of the antisense strand favor the guide strand loading into RISC process. For example, the single overhang is at least one, two, three, four, five, six, seven, eight, nine, or ten nucleotides in length. In some embodiments, the dsRNA has a 2 nucleotide overhang on the 3′-end of the antisense strand and a blunt end at the 5′-end of the antisense strand.

[0193] The dsRNA of the invention can comprise one or more modified nucleotides. For example, every nucleotide in the sense strand and antisense strand of the dsRNA molecule can be modified. Each nucleotide can be modified with the same or different modification which can include one or more alteration of one or both of the non-linking phosphate oxygens and/or of one or more of the linking phosphate oxygens; alteration of a constituent of the ribose sugar; replacement of the ribose sugar; wholesale replacement of the phosphate moiety with “dephospho” linkers; modification or replacement of a naturally occurring base; and replacement or modification of the ribose-phosphate backbone.

[0194] As nucleic acids are polymers of subunits, many of the modifications occur at a position which is repeated within a nucleic acid, e.g., a modification of a base, or a phosphate moiety, or a non-linking O of a phosphate moiety. In some cases, the modification will occur at all of the subject positions in the nucleic acid but in many cases it will not. By way of example, a modification may only occur at a 3′ or 5′ terminal position, may only occur in a central region, may only occur at a non-terminal region, or may only occur in a terminal region, e.g., at a position on a terminal nucleotide or in the last 2, 3, 4, 5, or 10 nucleotides of a strand. A modification may occur in a double strand region, a single strand region, or in both. A modification may occur only in the double strand region of a RNA or may only occur in a single strand region of a RNA. For example, a phosphorothioate modification at a non-linking O position may only occur at one or both termini, may only occur in a terminal region, e.g., at a position on a terminal nucleotide or in the last 2, 3, 4, 5, or 10 nucleotides of a strand, or may occur in double strand and single strand regions, particularly at termini. The 5′ end or ends can be phosphorylated.

[0195] It may be possible, e.g., to enhance stability, to include particular bases in overhangs, or to include modified nucleotides or nucleotide surrogates, in single strand overhangs, e.g., in a 5′ or 3′ overhang, or in both. For example, it can be desirable to include purine nucleotides in overhangs. In some embodiments all or some of the bases in a 3′ or 5′ overhang may be modified, e.g., with a modification described herein. Modifications can include, e.g., the use of modifications at the 2′ position of the ribose sugar with modifications that are known in the art, e.g., the use of deoxyribonucleotides, 2′-deoxy-2′-fluoro (2′-F) or 2′-O-methyl modified instead of the ribosugar of the nucleobase, and modifications in the phosphate group, e.g., phosphorothioate modifications. Overhangs need not be homologous with the target sequence.

[0196] In some embodiments, the dsRNA molecule of the invention comprises modifications of an alternating pattern, particular in the B1, B2, B3, B1′, B2′, B3′, B4′ regions. The term “alternating motif” or “alternative pattern” as used herein refers to a motif having one or more modifications, each modification occurring on alternating nucleotides of one strand. The alternating nucleotide may refer to one per every other nucleotide or one per every three nucleotides, or a similar pattern. For example, if A, B and C each represent one type of modification to the nucleotide, the alternating motif can be “ABABABABABAB . . . ” “AABBAABBAABB . . . ” “AABAABAABAAB . . . ” “AAABAAABAAAB . . . “AAABBBAAABBB . . . ,” or “ABCABCABCABC . . . ,” etc.

[0197] The type of modifications contained in the alternating motif may be the same or different. For example, if A, B, C, D each represent one type of modification on the nucleotide, the alternating pattern, i.e., modifications on every other nucleotide, may be the same, but each of the sense strand or antisense strand can be selected from several possibilities of modifications within the alternating motif such as “ABABAB . . . “, “ACACAC . . . ” “BDBDBD . . . ” or “CDCDCD . . . ,” etc.

[0198] In some embodiments, the dsRNA molecule of the invention comprises the modification pattern for the alternating motif on the sense strand relative to the modification pattern for the alternating motif on the antisense strand is shifted. The shift may be such that the modified group of nucleotides of the sense strand corresponds to a differently modified group of nucleotides of the antisense strand and vice versa. For example, the sense strand when paired with the antisense strand in the dsRNA duplex, the alternating motif in the sense strand may start with “ABABAB” from 5′-3′ of the strand and the alternating motif in the antisense strand may start with “BABABA” from 3′-5′ of the strand within the duplex region. As another example, the alternating motif in the sense strand may start with “AABBAABB” from 5′-3′ of the strand and the alternating motif in the antisense strand may start with “BBAABBAA” from 3′-5′ of the strand within the duplex region, so that there is a complete or partial shift of the modification patterns between the sense strand and the antisense strand.

### 5′-Modifications

[0199] In some embodiments dsRNA molecules of the invention are 5′ phosphorylated or include a phosphoryl analog or phosphate mimic at the 5′ terminus. 5′-phosphate modifications include those which are compatible with RISC mediated gene silencing. Suitable modifications include: 5′-monophosphate ((HO)₂(O)P—O-5′); 5′-diphosphate ((HO)₂(O)P—O—P(HO)(O)—O-5′); 5′-triphosphate ((HO)₂(O)P—O—(HO)(O)P—O—P(HO)(O)—O—5′); 5′-guanosine cap (7-methylated or non-methylated)(7m-G-O—5′-(HO)(O)P—O—(HO)(O)P—O—P(HO)(O)—O—5′); 5′-adenosine cap (Appp), and any modified or unmodified nucleotide cap structure (N—O—5′-(HO)(O)P—O—(HO)(O)P—O-P(HO)(O)—O—5′); 5′-monothiophosphate (phosphorothioate; (HO)₂(S)P—O—5′); 5′-monodithiophosphate (phosphorodithioate; (HO)(HS)(S)P—O—5′), 5′-phosphorothiolate ((HO)₂(O)P—S-5′); any additional combination of oxygen/sulfur replaced monophosphate, diphosphate and triphosphates (e.g. 5′-alpha-thiotriphosphate, 5′-gamma-thiotriphosphate, etc.), 5′-phosphoramidates ((HO)₂(O)P—NH-5′, (HO)(NH2)(O)P—O—5′), 5′-alkylphosphonates (e.g. RP(OH)(O)—O—5′-, R=alkyl, such as methyl, ethyl, isopropyl, propyl, etc.), 5′-alkenylphosphonates (i.e. vinyl, substituted vinyl), (OH)₂(O)P—5′—CH₂-), cyclopropylphosphonates, 5′-alkyletherphosphonates (R=alkylether-methoxymethyl(MeOCH2—), ethoxymethyl, etc., e.g. RP(OH)(O)—O—5′-). In one example, the modification can in placed in the antisense strand of a dsRNA molecule.

[0200] In some embodiments of any one of the aspects, the antisense strand comprises a phosphoryl analog or phosphate mimic at the 5′-terminus. In some embodiments, the antisense strand comprises an alkenylphosphonates, i.e., a vinyl phosphonate at the 5′-terminus. For example, the antisense strand comprises a 5′-E-vinyl phosphonate. In exemplary embodiments, a 5′ vinyl phosphonate modified nucleotide at the 5′-terminus may have the structure:

[chemical structure]

wherein X is O or S; R is hydrogen, hydroxy, fluoro, or C₁₋₂₀alkoxy (e.g., methoxy); R⁵′ is ═C(H)—P(O)(OH)₂ and the double bond between the C₅′ carbon and R⁵′ is in the E or Z orientation (e.g., E orientation); and B is a nucleobase or a modified nucleobase, optionally where B is adenine, guanine, cytosine, thymine, or uracil.

[0201] In some embodiments, the antisense strand comprises a cyclopropylphosphonate at the 5′-terminus. For example, the antisense comprises

[chemical structure]

at the 5′-terminus (which, for example, may replace the 4′-group in immediately preceding structure.

[0202] The dsRNA agents of the invention can comprise thermally destabilizing modifications in the seed region of the antisense strand (i.e., at positions 2-9 of the 5′-end of the antisense strand) to reduce or inhibit off-target gene silencing. Without wishing to be bound by a theory, dsRNAs with an antisense strand comprising at least one thermally destabilizing modification of the duplex within the first 9 nucleotide positions, counting from the 5′ end, of the antisense strand have reduced off-target gene silencing activity. Accordingly, in some embodiments, the antisense strand comprises at least one (e.g., one, two, three, four, five or more) thermally destabilizing modification of the duplex within the first 9 nucleotide positions of the 5′ region of the antisense strand. In some embodiments, thermally destabilizing modification of the duplex is located in positions 2-9, or preferably positions 4-8, from the 5′-end of the antisense strand. In some further embodiments, the thermally destabilizing modification of the duplex is located at position 5, 6, 7 or 8 from the 5′-end of the antisense strand.

[0203] In still some further embodiments, the thermally destabilizing modification of the duplex is located at position 7 from the 5′-end of the antisense strand.

[0204] The term “thermally destabilizing modification(s)” includes modification(s) that would result with a dsRNA with a lower overall melting temperature (Tm)(preferably a Tm with one, two, three or four degrees lower than the Tm of the dsRNA without having such modification(s). In some embodiments, the thermally destabilizing modification of the duplex is located at position 2, 3, 4, 5, 6, 7, 8 or 9 from the 5′-end of the antisense strand.

[0205] The thermally destabilizing modifications can include, but are not limited to, abasic modification; mismatch with the opposing nucleotide in the opposing strand; and sugar modification such as 2′-deoxy modification or acyclic nucleotide, e.g., unlocked nucleic acids (UNA) or glycol nucleic acid (GNA), or a 5′-2′-linked nucleotide (e.g., having 3′-OMe, 3′-F, 3′-H or 3′-OH, herein a “3′-RNA”). For example, the thermally destabilizing modifications can include, but are not limited to, mUNA and GNA building blocks as follows:

[chemical structure]

[chemical structure]

[chemical structure]

[chemical structure]

[chemical structure]

[chemical structure]

[0206] In some embodiments, the destabilizing modification is a 5′-2′-linked nucleotide (e.g., having 3′-OMe, 3′-F, 3′-H or 3′-OH. In some embodiments, the destabilizing modification is a 5′-2′-linked nucleotide having 3′-OMe, 3′-F, 3′-H or 3′-OH. In some embodiments, the destabilizing modification is a 5′-2′-linked nucleotide having 3′-OMe. In some embodiments, the destabilizing modification is a 5′-2′-linked nucleotide having 3′-F. In some embodiments, the destabilizing modification is a 5′-2′-linked nucleotide having 3′-H. In some embodiments, the destabilizing modification is a 5′-2′-linked nucleotide having 3′-OH, e.g., having the formula

[chemical structure]

wherein B is a nucleotide base or a nucleotide base analog, optionally where B is adenine, guanine, cytosine, thymine or uracil.

[0207] In some embodiments, the destabilizing modification is selected from the group consisting of GNA-isoC, GNA-isoG, 5′-mUNA, 4′-mUNA, 3′-mUNA, and 2′-mUNA.

[0208] In some embodiments, the destabilizing modification mUNA is selected from the group consisting of

[chemical structure]

[0209] R═H, OH; OMe; Cl, F; OH; O—(CH₂)₂OMe; SMe, NMe₂; NH₂; Me; CCH(alkyne), O-nPr; O-alkyl; O-alkylamino;
[0210] R′═H, Me;
[0211] B=A; C; 5-Me-C; G; I; U; T; Y; 2-thiouridine; 4-thiouridine; C5-modified pyrimidines; C2-modified purines; N8-modiifed purines; phenoxazine; G-clamp; non-canonical mono, bi and tricyclic heterocycles; pseudouracil; isoC; isoG; 2,6-diamninopurine; pseudocytosine; 2-aminopurine; xanthosine; N⁶-alkyl-A; O⁶-alkyl-G; 2-thiouridine; 4-thiouridine; C5-modified pyrimidines; C2-modified purines; N8-modiifed purines; 7-deazapurines, phenoxazine; G-clamp; non-canonical mono, bi and tricyclic heterocycles; and
[0212] Stereochemistry is R or S and combination of R and S for the unspecified chiral centers.

[0213] In some embodiments, the destabilizing modification mUNA is selected from the group consisting of

[chemical structure]

[0214] R═H, OH; OMe; CI, F; OH; O—(CH₂)₂OMe; SMe, NMe₂; NH₂; Me; CCH(alkyne), O-nPr; O-alkyl; O-alkylamino;
[0215] R′═H, Me;
[0216] B=A; C; 5-Me-C; G; I; U; T; Y; 2-thiouridine; 4-thiouridine; C₅-modified pyrimidines; C2-modified purines; N8-modiifed purines; phenoxazine; G-clamp; non-canonical mono, bi and tricyclic heterocycles; pseudouracil; isoC; isoG; 2,6-diamninopurine; pseudocytosine; 2-aminopurine; xanthosine; N⁶-alkyl-A; O⁶-alkyl-G; 2-thiouridine; 4-thiouridine; C₅-modified pyrimidines; C2-modified purines; N8-modiifed purines; 7-deazapurines, phenoxazine; G-clamp; non-canonical mono, bi and tricyclic heterocycles; and
[0217] Stereochemistry is R or S and combination of R and S for the unspecified chiral centers.

[0218] In some embodiments, the destabilizing modification mUNA is selected from the group consisting of

[chemical structure]

[0219] R═H, OMe; F; OH; O—(CH₂)₂OMe; SMe, NMe₂; NH₂; Me; O-nPr; O-alkyl; O-alkylamino; R′═H, Me;
[0220] B=A; C; 5-Me-C; G; I; U; T; Y; 2-thiouridine; 4-thiouridine; C₅-modified pyrimidines; C2-modified purines; N8-modiifed purines; phenoxazine; G-clamp; non-canonical mono, bi and tricyclic heterocycles; pseudouracil; isoC; isoG; 2,6-diamninopurine; pseudocytosine; 2-aminopurine; xanthosine; N⁶-alkyl-A; O⁶-alkyl-G; 7-deazapurines; and Stereochemistry is R or S and combination of R and S for the unspecified chiral centers.

[0221] In some embodiments, the destabilizing modification mUNA is selected from the group consisting of

[chemical structure]

[0222] R═H, OH; OMe; Cl, F; OH; O—(CH₂)₂OMe; SMe, NMe₂; NH₂; Me; CCH(alkyne), O-nPr; O-alkyl; O-alkylamino;
[0223] R′═H, Me;
[0224] B=A; C; 5-Me-C; G; I; U; T; Y; 2-thiouridine; 4-thiouridine; C₅-modified pyrimidines; C2-modified purines; N8-modiifed purines; phenoxazine; G-clamp; non-canonical mono, bi and tricyclic heterocycles; pseudouracil; isoC; isoG; 2,6-diamninopurine; pseudocytosine; 2-aminopurine; xanthosine; N⁶-alkyl-A; O⁶-alkyl-G; 2-thiouridine; 4-thiouridine; C₅-modified pyrimidines; C2-modified purines; N8-modiifed purines; 7-deazapurines, phenoxazine; G-clamp; non-canonical mono, bi and tricyclic heterocycles; and
[0225] Stereochemistry is R or S and combination of R and S for the unspecified chiral centers

[0226] In some embodiments, the destabilizing modification mUNA is selected from the group consisting of

[chemical structure]

[0227] R═H, OH; OMe; Cl, F; OH; O—(CH₂)₂OMe; SMe, NMe₂; NH₂; Me; CCH(alkyne), O-nPr; O-alkyl; O-alkylamino;
[0228] R′═H, Me;
[0229] B=A; C; 5-Me-C; G; I; U; T; Y; 2-thiouridine; 4-thiouridine; C₅-modified pyrimidines; C2-modified purines; N8-modiifed purines; phenoxazine; G-clamp; non-canonical mono, bi and tricyclic heterocycles; pseudouracil; isoC; isoG; 2,6-diamninopurine; pseudocytosine; 2-aminopurine; xanthosine; N⁶-alkyl-A; O⁶-alkyl-G; 2-thiouridine; 4-thiouridine; C₅-modified pyrimidines; C2-modified purines; N8-modiifed purines; 7-deazapurines, phenoxazine; G-clamp; non-canonical mono, bi and tricyclic heterocycles; and
[0230] Stereochemistry is R or S and combination of R and S for the unspecified chiral centers

[0231] In some embodiments, the modification mUNA is selected from the group consisting of

[chemical structure]

[0232] R═H, OMe; F; OH; O—(CH₂)₂OMe; SMe, NMe₂; NH₂; Me; O-nPr; O-alkyl; O-alkylamino;
[0233] R′═H, Me;
[0234] B=A; C; 5-Me-C; G; I; U; T; Y; 2-thiouridine; 4-thiouridine; C₅-modified pyrimidines; C2-modified purines; N8-modiifed purines; phenoxazine; G-clamp; non-canonical mono, bi and tricyclic heterocycles; pseudouracil; isoC; isoG; 2,6-diamninopurine; pseudocytosine; 2-aminopurine; xanthosine; N⁶-alkyl-A; O⁶-alkyl-G; 7-deazapurines; and Stereochemistry is R or S and combination of R and S for the unspecified chiral centers

[0235] Exemplary abasic modifications include, but are not limited to the following:

[chemical structure]

[0236] Wherein R═H, Me, Et or OMe; R′═H, Me, Et or OMe; R″═H, Me, Et or OMe

[chemical structure]

wherein B is a modified or unmodified nucleobase and the asterisk on each structure represents either R, S or racemic.

[0237] Exemplified sugar modifications include, but are not limited to the following:

[chemical structure]

wherein B is a modified or unmodified nucleobase and the asterisk on each structure represents either R, S or racemic.

[0238] In some embodiments the thermally destabilizing modification of the duplex is selected from the mUNA and GNA building blocks described in Examples 1-3 herein. In some embodiments, the destabilizing modification is selected from the group consisting of GNA-isoC, GNA-isoG, 5′-mUNA, 4′-mUNA, 3′-mUNA, and 2′-mUNA. In some further embodiments of this, the dsRNA molecule further comprises at least one thermally destabilizing modification selected from the group consisting of GNA, 2′-OMe, 3′-OMe, 5′-Me, Hy p-spacer, SNA, hGNA, hhGNA, mGNA, TNA and h′GNA (Mod A-Mod K).

[0239] The term “acyclic nucleotide” refers to any nucleotide having an acyclic ribose sugar, for example, where any of bonds between the ribose carbons (e.g., C1′-C2′, C2′-C3′, C3′-C4′, C4′-O4′, or C1′-O4′) is absent and/or at least one of ribose carbons or oxygen (e.g., C1′, C2′, C3′, C4′ or O4′) are independently or in combination absent from the nucleotide. In some embodiments, acyclic nucleotide is

[chemical structure]

wherein B is a modified or unmodified nucleobase, R1 and R2 independently are H, halogen, OR3, or alkyl; and R3 is H, alkyl, cycloalkyl, aryl, aralkyl, heteroaryl or sugar). The term “UNA” refers to unlocked acyclic nucleic acid, wherein any of the bonds of the sugar has been removed, forming an unlocked “sugar” residue. In one example, UNA also encompasses monomers with bonds between C1′-C4′ being removed (i.e. the covalent carbon-oxygen-carbon bond between the C1′ and C4′ carbons). In another example, the C2′-C3′ bond (i.e. the covalent carbon-carbon bond between the C2′ and C3′ carbons) of the sugar is removed (see Mikhailov et. al., Tetrahedron Letters, 26(17): 2059(1985); and Fluiter et al., Mol. Biosyst., 10:1039 (2009), which are hereby incorporated by reference in their entirety). The acyclic derivative provides greater backbone flexibility without affecting the Watson-Crick pairings. The acyclic nucleotide can be linked via 2′-5′ or 3′-5′ linkage.

[0240] The term ‘GNA’ refers to glycol nucleic acid which is a polymer similar to DNA or RNA but differing in the composition of its “backbone” in that is composed of repeating glycerol units linked by phosphodiester bonds:

[chemical structure]

[0241] The thermally destabilizing modification of the duplex can be mismatches (i.e., noncomplementary base pairs) between the thermally destabilizing nucleotide and the opposing nucleotide in the opposite strand within the dsRNA duplex. Exemplary mismatch base pairs include G: G, G: A, G: U, G: T, A: A, A: C, C: C, C: U, C: T, U: U, T: T, U: T, or a combination thereof. Other mismatch base pairings known in the art are also amenable to the present invention. A mismatch can occur between nucleotides that are either naturally occurring nucleotides or modified nucleotides, i.e., the mismatch base pairing can occur between the nucleobases from respective nucleotides independent of the modifications on the ribose sugars of the nucleotides. In certain embodiments, the dsRNA molecule contains at least one nucleobase in the mismatch pairing that is a 2′-deoxy nucleobase; e.g., the 2′-deoxy nucleobase is in the sense strand.

[0242] In some embodiments, the thermally destabilizing modification of the duplex in the seed region of the antisense strand includes nucleotides with impaired W-C H-bonding to complementary base on the target mRNA, such as:

[chemical structure]

[chemical structure]

[0243] More examples of abasic nucleotide, acyclic nucleotide modifications (including UNA and GNA), and mismatch modifications have been described in detail in WO 2011/133876, which is herein incorporated by reference in its entirety.

[0244] The thermally destabilizing modifications may also include universal base with reduced or abolished capability to form hydrogen bonds with the opposing bases, and phosphate modifications.

[0245] In some embodiments, the thermally destabilizing modification of the duplex includes nucleotides with non-canonical bases such as, but not limited to, nucleobase modifications with impaired or completely abolished capability to form hydrogen bonds with bases in the opposite strand. These nucleobase modifications have been evaluated for destabilization of the central region of the dsRNA duplex as described in WO 2010/0011895, which is herein incorporated by reference in its entirety. Exemplary nucleobase modifications are:

[chemical structure]

[0246] In some embodiments, the thermally destabilizing modification of the duplex in the seed region of the antisense strand includes one or more α-nucleotide complementary to the base on the target mRNA, such as:

[chemical structure]

Wherein R is H, OH, OCH₃, F, NH₂, NHMe, NMe₂ or O-alkyl

[0247] Exemplary phosphate modifications known to decrease the thermal stability of dsRNA duplexes compared to natural phosphodiester linkages are:

[chemical structure]

[0248] The alkyl for the R group can be a C₁-C₆alkyl. Specific alkyls for the R group include, but are not limited to methyl, ethyl, propyl, isopropyl, butyl, pentyl and hexyl.

[0249] It is noted a thermally destabilizing modification can replace a 2′-doexy nucleotide in the antisense strand. For example, a 2′-deoxy nucleotide at positions 2, 5, 7, 12, 14 and/or 16, counting from 5′-end, of the antisense strand can be replaced with a thermally destabilizing modification described herein. Thus, in some embodiments, the antisense strand comprises a thermally destabilizing modification at 1, 2, 3, 4, 5 and/or 6 of positions 2, 5, 7, 12, 14 and/or 16, counting from 5′-end of the antisense strand. For example, the antisense strand comprises a thermally destabilizing modification at positions 5 and 7, counting from 5′-end of the antisense strand.

[0250] In addition to the antisense strand comprising a thermally destabilizing modification, the dsRNA can also comprise one or more stabilizing modifications. For example, the dsRNA can comprise at least two (e.g., two, three, four, five, six, seven, eight, nine, ten or more) stabilizing modifications. Without limitations, the stabilizing modifications all can be present in one strand. In some embodiments, both the sense and the antisense strands comprise at least two stabilizing modifications. The stabilizing modification can occur on any nucleotide of the sense strand or antisense strand. For instance, the stabilizing modification can occur on every nucleotide on the sense strand and/or antisense strand; each stabilizing modification can occur in an alternating pattern on the sense strand or antisense strand; or the sense strand or antisense strand comprises both stabilizing modification in an alternating pattern. The alternating pattern of the stabilizing modifications on the sense strand may be the same or different from the antisense strand, and the alternating pattern of the stabilizing modifications on the sense strand can have a shift relative to the alternating pattern of the stabilizing modifications on the antisense strand.

[0251] In some embodiments, the antisense strand comprises at least two (e.g., two, three, four, five, six, seven, eight, nine, ten or more) stabilizing modifications. Without limitations, a stabilizing modification in the antisense strand can be present at any positions. In some embodiments, the antisense comprises stabilizing modifications at positions 2, 6, 8, 9, 14 and 16 from the 5′-end. In some other embodiments, the antisense comprises stabilizing modifications at positions 2, 6, 14 and 16 from the 5′-end. In still some other embodiments, the antisense comprises stabilizing modifications at positions 2, 14 and 16 from the 5′-end.

[0252] In some embodiments, the antisense strand comprises at least one stabilizing modification adjacent to the destabilizing modification. For example, the stabilizing modification can be the nucleotide at the 5′-end or the 3′-end of the destabilizing modification, i.e., at position-1 or +1 from the position of the destabilizing modification. In some embodiments, the antisense strand comprises a stabilizing modification at each of the 5′-end and the 3′-end of the destabilizing modification, i.e., positions-1 and +1 from the position of the destabilizing modification.

[0253] In some embodiments, the antisense strand comprises at least two stabilizing modifications at the 3′-end of the destabilizing modification, i.e., at positions +1 and +2 from the position of the destabilizing modification. In some embodiments, the sense strand comprises at least two (e.g., two, three, four, five, six, seven, eight, nine, ten or more) stabilizing modifications. Without limitations, a stabilizing modification in the sense strand can be present at any positions. In some embodiments, the sense strand comprises stabilizing modifications at positions 7, 10 and 11 from the 5′-end. In some other embodiments, the sense strand comprises stabilizing modifications at positions 7, 9, 10 and 11 from the 5′-end. In some embodiments, the sense strand comprises stabilizing modifications at positions opposite or complimentary to positions 11, 12 and 15 of the antisense strand, counting from the 5′-end of the antisense strand. In some other embodiments, the sense strand comprises stabilizing modifications at positions opposite or complimentary to positions 11, 12, 13 and 15 of the antisense strand, counting from the 5′-end of the antisense strand. In some embodiments, the sense strand comprises a block of two, three or four stabilizing modifications.

[0254] In some embodiments, the sense strand does not comprise a stabilizing modification in position opposite or complimentary to the thermally destabilizing modification of the duplex in the antisense strand.

[0255] Exemplary thermally stabilizing modifications include, but are not limited to 2′-fluoro modifications. Other thermally stabilizing modifications include, but are not limited to LNA.

[0256] It is noted a thermally stabilizing modification can replace a 2′-fluoro nucleotide in the sense and/or antisense strand. For example, a 2′-fluoro nucleotide at positions 8, 9, 10, 11 and/or 12, counting from 5′-end, of the sense strand, can be replaced with a thermally stabilizing modification. Similarly, a 2′-fluoro nucleotide at position 14, counting from 5′-end, of the antisense strand, can be replaced with a thermally stabilizing modification.

[0257] For the dsRNA molecules to be more effective in vivo, the antisense strand must have some metabolic stability. In other words, for the dsRNA molecules to be more effective in vivo, some amount of the antisense stand may need to be present in vivo after a period time after administration. Accordingly, in some embodiments, at least 40%, for example at least 45%, at least 50%, at least 55%, at least 60%., at least 65%, at least 70%, at least 75%, or at least 80% of the antisense strand of the dsRNA is present in vivo, for example in mouse liver, at day 5 after in vivo administration. In some embodiments, at least 40%, for example at least 45%, at least 50%, at least 55%, at least 60%., at least 65%, at least 70%, at least 75%, or at least 80% of the antisense strand of the dsRNA is present in vivo, for example in mouse liver, at day 6 after in vivo administration. In some embodiments, at least 40%, for example at least 45%, at least 50%, at least 55%, at least 60%., at least 65%, at least 70%, at least 75%, or at least 80% of the antisense strand of the dsRNA is present in vivo, for example in mouse liver, at day 7 after in vivo administration. In some embodiments, at least 40%, for example at least 45%, at least 50%, at least 55%, at least 60%., at least 65%, at least 70%, at least 75%, or at least 80% of the antisense strand of the dsRNA is present in vivo, for example in mouse liver, at day 8 after in vivo administration. In some embodiments, at least 40%, for example at least 45%, at least 50%, at least 55%, at least 60%., at least 65%, at least 70%, at least 75%, or at least 80% of the antisense strand of the dsRNA is present in vivo, for example in mouse liver, at day 9 after in vivo administration. In some embodiments, at least 40%, for example at least 45%, at least 50%, at least 55%, at least 60%., at least 65%, at least 70%, at least 75%, or at least 80% of the antisense strand of the dsRNA is present in vivo, for example in mouse liver, at day 10 after in vivo administration. In some embodiments, at least 40%, for example at least 45%, at least 50%, at least 55%, at least 60%., at least 65%, at least 70%, at least 75%, or at least 80% of the antisense strand of the dsRNA is present in vivo, for example in mouse liver, at day 11 after in vivo administration. In some embodiments, at least 40%, for example at least 45%, at least 50%, at least 55%, at least 60%., at least 65%, at least 70%, at least 75%, or at least 80% of the antisense strand of the dsRNA is present in vivo, for example in mouse liver, at day 12 after in vivo administration. In some embodiments, at least 40%, for example at least 45%, at least 50%, at least 55%, at least 60%., at least 65%, at least 70%, at least 75%, or at least 80% of the antisense strand of the dsRNA is present in vivo, for example in mouse liver, at day 13 after in vivo administration. In some embodiments, at least 40%, for example at least 45%, at least 50%, at least 55%, at least 60%., at least 65%, at least 70%, at least 75%, or at least 80% of the antisense strand of the dsRNA is present in vivo, for example in mouse liver, at day 14 after in vivo administration. In some embodiments, at least 40%, for example at least 45%, at least 50%, at least 55%, at least 60%., at least 65%, at least 70%, at least 75%, or at least 80% of the antisense strand of the dsRNA is present in vivo, for example in mouse liver, at day 15 after in vivo administration.

Uses of dsRNA

[0258] The present invention further relates to a use of a dsRNA molecule as defined herein for inhibiting expression of a target gene. In some embodiments, the present invention further relates to a use of a dsRNA molecule for inhibiting expression of a target gene in vitro.

[0259] The present invention further relates to a dsRNA molecule as defined herein for use in inhibiting expression of a target gene in a subject. The subject may be any animal, such as a mammal, e.g., a mouse, a rat, a sheep, a cattle, a dog, a cat, or a human

[0260] In some embodiments, the dsRNA molecule of the invention is administered in buffer. In some embodiments, siRNA compounds described herein can be formulated for administration to a subject. A formulated siRNA composition can assume a variety of states. In some examples, the composition is at least partially crystalline, uniformly crystalline, and/or anhydrous (e.g., less than 80, 50, 30, 20, or 10% water). In another example, the siRNA is in an aqueous phase, e.g., in a solution that includes water.

[0261] The aqueous phase or the crystalline compositions can, e.g., be incorporated into a delivery vehicle, e.g., a liposome (particularly for the aqueous phase) or a particle (e.g., a microparticle as can be appropriate for a crystalline composition). Generally, the siRNA composition is formulated in a manner that is compatible with the intended method of administration, as described herein. For example, in particular embodiments the composition is prepared by at least one of the following methods: spray drying, lyophilization, vacuum drying, evaporation, fluid bed drying, or a combination of these techniques; or sonication with a lipid, freeze-drying, condensation and other self-assembly.

[0262] A dsRNA preparation can be formulated in combination with another agent, e.g., another therapeutic agent or an agent that stabilizes a dsRNA, e.g., a protein that complexes with dsRNA to form an iRNP. Still other agents include chelating agents, e.g., EDTA (e.g., to remove divalent cations such as Mg²⁺), salts, RNAse inhibitors (e.g., a broad specificity RNAse inhibitor such as RNAsin) and so forth.

[0263] In some embodiments, the dsRNA preparation includes another dsRNA compound, e.g., a second dsRNA that can mediate RNAi with respect to a second gene, or with respect to the same gene. Still other preparation can include at least 3, 5, ten, twenty, fifty, or a hundred or more different siRNA species. Such dsRNAs can mediate RNAi with respect to a similar number of different genes.

[0264] In some embodiments, the dsRNA preparation includes at least a second therapeutic agent (e.g., an agent other than a RNA or a DNA). For example, a dsRNA composition for the treatment of a viral disease, e.g., HIV, might include a known antiviral agent (e.g., a protease inhibitor or reverse transcriptase inhibitor). In another example, a dsRNA composition for the treatment of a cancer might further comprise a chemotherapeutic agent.

[0265] Exemplary formulations which can be used for administering the dsRNA molecule according to the present invention are discussed below.

[0266] Liposomes. A dsRNA preparation can be formulated for delivery in a membranous molecular assembly, e.g., a liposome or a micelle. As used herein, the term “liposome” refers to a vesicle composed of amphiphilic lipids arranged in at least one bilayer, e.g., one bilayer or a plurality of bilayers. Liposomes include unilamellar and multilamellar vesicles that have a membrane formed from a lipophilic material and an aqueous interior. The aqueous portion contains the siRNA composition. The lipophilic material isolates the aqueous interior from an aqueous exterior, which typically does not include the siRNA composition, although in some examples, it may. Liposomes are useful for the transfer and delivery of active ingredients to the site of action. Because the liposomal membrane is structurally similar to biological membranes, when liposomes are applied to a tissue, the liposomal bilayer fuses with bilayer of the cellular membranes. As the merging of the liposome and cell progresses, the internal aqueous contents that include the dsRNA are delivered into the cell where the dsRNA can specifically bind to a target RNA and can mediate RNAi. In some cases, the liposomes are also specifically targeted, e.g., to direct the dsRNA to particular cell types.

[0267] A liposome containing a dsRNA can be prepared by a variety of methods. In one example, the lipid component of a liposome is dissolved in a detergent so that micelles are formed with the lipid component. For example, the lipid component can be an amphipathic cationic lipid or lipid conjugate. The detergent can have a high critical micelle concentration and may be nonionic. Exemplary detergents include cholate, CHAPS, octylglucoside, deoxycholate, and lauroyl sarcosine. The dsRNA preparation is then added to the micelles that include the lipid component. The cationic groups on the lipid interact with the siRNA and condense around the dsRNA to form a liposome. After condensation, the detergent is removed, e.g., by dialysis, to yield a liposomal preparation of dsRNA.

[0268] If necessary a carrier compound that assists in condensation can be added during the condensation reaction, e.g., by controlled addition. For example, the carrier compound can be a polymer other than a nucleic acid (e.g., spermine or spermidine). pH can also be adjusted to favor condensation.

[0269] Further description of methods for producing stable polynucleotide delivery vehicles, which incorporate a polynucleotide/cationic lipid complex as structural components of the delivery vehicle, are described in, e.g., WO 96/37194. Liposome formation can also include one or more aspects of exemplary methods described in Felgner, P. L. et al., Proc. Natl. Acad. Sci., USA 8:7413-7417, 1987; U.S. Pat. Nos. 4,897,355; 5,171,678; Bangham, et al. M. Mol. Biol. 23:238, 1965; Olson, et al. Biochim. Biophys. Acta 557:9, 1979; Szoka, et al. Proc. Natl. Acad. Sci. 75:4194, 1978; Mayhew, et al. Biochim. Biophys. Acta 775:169, 1984; Kim, et al. Biochim. Biophys. Acta 728:339, 1983; and Fukunaga, et al. Endocrinol. 115:757, 1984, which are incorporated by reference in their entirety. Commonly used techniques for preparing lipid aggregates of appropriate size for use as delivery vehicles include sonication and freeze-thaw plus extrusion (see, e.g., Mayer, et al. Biochim. Biophys. Acta 858:161, 1986, which is incorporated by reference in its entirety). Microfluidization can be used when consistently small (50 to 200 nm) and relatively uniform aggregates are desired (Mayhew, et al. Biochim. Biophys. Acta 775:169, 1984, which is incorporated by reference in its entirety). These methods are readily adapted to packaging siRNA preparations into liposomes.

[0270] Liposomes that are pH-sensitive or negatively-charged entrap nucleic acid molecules rather than complex with them. Since both the nucleic acid molecules and the lipid are similarly charged, repulsion rather than complex formation occurs. Nevertheless, some nucleic acid molecules are entrapped within the aqueous interior of these liposomes. pH-sensitive liposomes have been used to deliver DNA encoding the thymidine kinase gene to cell monolayers in culture. Expression of the exogenous gene was detected in the target cells (Zhou et al., Journal of Controlled Release, 19, (1992) 269-274, which is incorporated by reference in its entirety).

[0271] One major type of liposomal composition includes phospholipids other than naturally-derived phosphatidylcholine. Neutral liposome compositions, for example, can be formed from dimyristoyl phosphatidylcholine (DMPC) or dipalmitoyl phosphatidylcholine (DPPC). Anionic liposome compositions generally are formed from dimyristoyl phosphatidylglycerol, while anionic fusogenic liposomes are formed primarily from dioleoyl phosphatidylethanolamine (DOPE). Another type of liposomal composition is formed from phosphatidylcholine (PC) such as, for example, soybean PC, and egg PC. Another type is formed from mixtures of phospholipid and/or phosphatidylcholine and/or cholesterol.

[0272] Examples of other methods to introduce liposomes into cells in vitro and include U.S. Pat. Nos. 5,283,185; 5,171,678; WO 94/00569; WO 93/24640; WO 91/16024; Felgner, J. Biol. Chem. 269:2550, 1994; Nabel, Proc. Natl. Acad. Sci. 90:11307, 1993; Nabel, Human Gene Ther. 3:649, 1992; Gershon, Biochem. 32:7143, 1993; and Strauss EMBO J. 11:417, 1992.

[0273] In some embodiments, cationic liposomes are used. Cationic liposomes possess the advantage of being able to fuse to the cell membrane. Non-cationic liposomes, although not able to fuse as efficiently with the plasma membrane, are taken up by macrophages in vivo and can be used to deliver siRNAs to macrophages.

[0274] Further advantages of liposomes include: liposomes obtained from natural phospholipids are biocompatible and biodegradable; liposomes can incorporate a wide range of water and lipid soluble drugs; liposomes can protect encapsulated siRNAs in their internal compartments from metabolism and degradation (Rosoff, in “Pharmaceutical Dosage Forms,” Lieberman, Rieger and Banker (Eds.), 1988, volume 1, p. 245). Important considerations in the preparation of liposome formulations are the lipid surface charge, vesicle size and the aqueous volume of the liposomes.

[0275] A positively charged synthetic cationic lipid, N—[1-(2,3-dioleyloxy) propyl]-N,N,N-trimethylammonium chloride (DOTMA) can be used to form small liposomes that interact spontaneously with nucleic acid to form lipid-nucleic acid complexes which are capable of fusing with the negatively charged lipids of the cell membranes of tissue culture cells, resulting in delivery of siRNA (see, e.g., Felgner, P. L. et al., Proc. Natl. Acad. Sci., USA 8:7413-7417, 1987 and U.S. Pat. No. 4,897,355 for a description of DOTMA and its use with DNA, which are incorporated by reference in their entirety).

[0276] A DOTMA analogue, 1,2-bis(oleoyloxy)-3-(trimethylammonia) propane (DOTAP) can be used in combination with a phospholipid t to form DNA-complexing vesicles. Lipofectin™ Bethesda Research Laboratories, Gaithersburg, Md.) is an effective agent for the delivery of highly anionic nucleic acids into living tissue culture cells that comprise positively charged DOTMA liposomes which interact spontaneously with negatively charged polynucleotides to form complexes. When enough positively charged liposomes are used, the net charge on the resulting complexes is also positive. Positively charged complexes prepared in this way spontaneously attach to negatively charged cell surfaces, fuse with the plasma membrane, and efficiently deliver functional nucleic acids into, for example, tissue culture cells. Another commercially available cationic lipid, 1,2-bis(oleoyloxy)-3,3-(trimethylammonia) propane (“DOTAP”)(Boehringer Mannheim, Indianapolis, Indiana) differs from DOTMA in that the oleoyl moieties are linked by ester, rather than ether linkages.

[0277] Other reported cationic lipid compounds include those that have been conjugated to a variety of moieties including, for example, carboxyspermine which has been conjugated to one of two types of lipids and includes compounds such as 5-carboxyspermylglycine dioctaoleoylamide (“DOGS”)(Transfectam™, Promega, Madison, Wisconsin) and dipalmitoylphosphatidylethanolamine 5-carboxyspermyl-amide (“DPPES”)(see, e.g., U.S. Pat. No. 5,171,678).

[0278] Another cationic lipid conjugate includes derivatization of the lipid with cholesterol (“DC-Chol”) which has been formulated into liposomes in combination with DOPE (See, Gao, X. and Huang, L., Biochim. Biophys. Res. Commun. 179:280, 1991). Lipopolylysine, made by conjugating polylysine to DOPE, has been reported to be effective for transfection in the presence of serum (Zhou, X. et al., Biochim. Biophys. Acta 1065:8, 1991, which is incorporated by reference in its entirety). For certain cell lines, these liposomes containing conjugated cationic lipids, are said to exhibit lower toxicity and provide more efficient transfection than the DOTMA-containing compositions. Other commercially available cationic lipid products include DMRIE and DMRIE-HP(Vical, La Jolla, California) and Lipofectamine (DOSPA)(Life Technology, Inc., Gaithersburg, Maryland). Other cationic lipids suitable for the delivery of oligonucleotides are described in WO 98/39359 and WO 96/37194.

[0279] Liposomal formulations are particularly suited for topical administration. Liposomes present several advantages over other formulations. Such advantages include reduced side effects related to high systemic absorption of the administered drug, increased accumulation of the administered drug at the desired target, and the ability to administer siRNA, into the skin. In some implementations, liposomes are used for delivering siRNA to epidermal cells and also to enhance the penetration of siRNA into dermal tissues, e.g., into skin. For example, the liposomes can be applied topically. Topical delivery of drugs formulated as liposomes to the skin has been documented (see, e.g., Weiner et al., Journal of Drug Targeting, 1992, vol. 2,405-410 and du Plessis et al., Antiviral Research, 18, 1992, 259-265; Mannino, R. J. and Fould-Fogerite, S., Biotechniques 6:682-690, 1988; Itani, T. et al. Gene 56:267-276. 1987; Nicolau, C. et al. Meth. Enz. 149:157-176, 1987; Straubinger, R. M. and Papahadjopoulos, D. Meth. Enz. 101:512-527, 1983; Wang, C. Y. and Huang, L., Proc. Natl. Acad. Sci. USA 84:7851-7855, 1987, which are incorporated by reference in their entirety).

[0280] Non-ionic liposomal systems have also been examined to determine their utility in the delivery of drugs to the skin, in particular systems comprising non-ionic surfactant and cholesterol. Non-ionic liposomal formulations comprising Novasome I (glyceryl dilaurate/cholesterol/polyoxyethylene-10-stearyl ether) and Novasome II (glyceryl distearate/cholesterol/polyoxyethylene-10-stearyl ether) were used to deliver a drug into the dermis of mouse skin. Such formulations with dsRNA described herein are useful for treating a dermatological disorder.

[0281] Liposomes that include dsRNA described herein can be made highly deformable. Such deformability can enable the liposomes to penetrate through pore that are smaller than the average radius of the liposome. For example, transfersomes are a type of deformable liposomes. Transfersomes can be made by adding surface edge activators, usually surfactants, to a standard liposomal composition. Transfersomes that include dsRNA described herein can be delivered, for example, subcutaneously by infection in order to deliver dsRNA to keratinocytes in the skin. In order to cross intact mammalian skin, lipid vesicles must pass through a series of fine pores, each with a diameter less than 50 nm, under the influence of a suitable transdermal gradient. In addition, due to the lipid properties, these transfersomes can be self-optimizing (adaptive to the shape of pores, e.g., in the skin), self-repairing, and can frequently reach their targets without fragmenting, and often self-loading.

[0282] Other formulations amenable to the present invention are described in U.S. provisional application Ser. No. 61/018,616, filed Jan. 2, 2008; 61/018,611, filed Jan. 2, 2008; 61/039,748, filed Mar. 26, 2008; 61/047,087, filed Apr. 22, 2008 and 61/051,528, filed May 8, 2008. PCT application no PCT/US2007/080331, filed Oct. 3, 2007 also describes formulations that are amenable to the present invention.

[0283] Surfactants. The dsRNA compositions can include a surfactant. In some embodiments, the dsRNA is formulated as an emulsion that includes a surfactant. The most common way of classifying and ranking the properties of the many different types of surfactants, both natural and synthetic, is by the use of the hydrophile/lipophile balance (HLB). The nature of the hydrophilic group provides the most useful means for categorizing the different surfactants used in formulations (Rieger, in “Pharmaceutical Dosage Forms,” Marcel Dekker, Inc., New York, NY, 1988, p. 285).

[0284] If the surfactant molecule is not ionized, it is classified as a nonionic surfactant. Nonionic surfactants find wide application in pharmaceutical products and are usable over a wide range of pH values. In general, their HLB values range from 2 to about 18 depending on their structure. Nonionic surfactants include nonionic esters such as ethylene glycol esters, propylene glycol esters, glyceryl esters, polyglyceryl esters, sorbitan esters, sucrose esters, and ethoxylated esters. Nonionic alkanolamides and ethers such as fatty alcohol ethoxylates, propoxylated alcohols, and ethoxylated/propoxylated block polymers are also included in this class. The polyoxyethylene surfactants are the most popular members of the nonionic surfactant class.

[0285] If the surfactant molecule carries a negative charge when it is dissolved or dispersed in water, the surfactant is classified as anionic. Anionic surfactants include carboxylates such as soaps, acyl lactylates, acyl amides of amino acids, esters of sulfuric acid such as alkyl sulfates and ethoxylated alkyl sulfates, sulfonates such as alkyl benzene sulfonates, acyl isethionates, acyl taurates and sulfosuccinates, and phosphates. The most important members of the anionic surfactant class are the alkyl sulfates and the soaps.

[0286] If the surfactant molecule carries a positive charge when it is dissolved or dispersed in water, the surfactant is classified as cationic. Cationic surfactants include quaternary ammonium salts and ethoxylated amines. The quaternary ammonium salts are the most used members of this class.

[0287] If the surfactant molecule has the ability to carry either a positive or negative charge, the surfactant is classified as amphoteric. Amphoteric surfactants include acrylic acid derivatives, substituted alkylamides, N-alkylbetaines and phosphatides.

[0288] The use of surfactants in drug products, formulations and in emulsions has been reviewed (Rieger, in “Pharmaceutical Dosage Forms,” Marcel Dekker, Inc., New York, NY, 1988, p. 285).

[0289] Micelles and other Membranous Formulations. For ease of exposition the micelles and other formulations, compositions and methods in this section are discussed largely with regard to unmodified siRNA compounds. It may be understood, however, that these micelles and other formulations, compositions and methods can be practiced with other siRNA compounds, e.g., modified siRNA compounds, and such practice is within the invention. The siRNA compound, e.g., a double-stranded siRNA compound, or ssiRNA compound, (e.g., a precursor, e.g., a larger siRNA compound which can be processed into a ssiRNA compound, or a DNA which encodes an siRNA compound, e.g., a double-stranded siRNA compound, or ssiRNA compound, or precursor thereof)) composition can be provided as a micellar formulation. “Micelles” are defined herein as a particular type of molecular assembly in which amphipathic molecules are arranged in a spherical structure such that all the hydrophobic portions of the molecules are directed inward, leaving the hydrophilic portions in contact with the surrounding aqueous phase. The converse arrangement exists if the environment is hydrophobic.

[0290] A mixed micellar formulation suitable for delivery through transdermal membranes may be prepared by mixing an aqueous solution of the dsRNA composition, an alkali metal C₈ to C₂₂ alkyl sulphate, and a micelle forming compounds. Exemplary micelle forming compounds include lecithin, hyaluronic acid, pharmaceutically acceptable salts of hyaluronic acid, glycolic acid, lactic acid, chamomile extract, cucumber extract, oleic acid, linoleic acid, linolenic acid, monoolein, monooleates, monolaurates, borage oil, evening of primrose oil, menthol, trihydroxy oxo cholanyl glycine and pharmaceutically acceptable salts thereof, glycerin, polyglycerin, lysine, polylysine, triolein, polyoxyethylene ethers and analogues thereof, polidocanol alkyl ethers and analogues thereof, chenodeoxycholate, deoxycholate, and mixtures thereof. The micelle forming compounds may be added at the same time or after addition of the alkali metal alkyl sulphate. Mixed micelles will form with substantially any kind of mixing of the ingredients but vigorous mixing in order to provide smaller size micelles.

[0291] In one method, a first micellar composition is prepared which contains the dsRNA composition and at least the alkali metal alkyl sulphate. The first micellar composition is then mixed with at least three micelle forming compounds to form a mixed micellar composition. In another method, the micellar composition is prepared by mixing the dsRNA composition, the alkali metal alkyl sulphate and at least one of the micelle forming compounds, followed by addition of the remaining micelle forming compounds, with vigorous mixing.

[0292] Phenol and/or m-cresol may be added to the mixed micellar composition to stabilize the formulation and protect against bacterial growth. Alternatively, phenol and/or m-cresol may be added with the micelle forming ingredients. An isotonic agent such as glycerin may also be added after formation of the mixed micellar composition.

[0293] For delivery of the micellar formulation as a spray, the formulation can be put into an aerosol dispenser and the dispenser is charged with a propellant. The propellant, which is under pressure, is in liquid form in the dispenser. The ratios of the ingredients are adjusted so that the aqueous and propellant phases become one, i.e., there is one phase. If there are two phases, it is necessary to shake the dispenser prior to dispensing a portion of the contents, e.g., through a metered valve. The dispensed dose of pharmaceutical agent is propelled from the metered valve in a fine spray.

[0294] Propellants may include hydrogen-containing chlorofluorocarbons, hydrogen-containing fluorocarbons, dimethyl ether and diethyl ether. In certain embodiments, HFA 134a (1,1,1,2 tetrafluoroethane) may be used.

[0295] The specific concentrations of the essential ingredients can be determined by relatively straightforward experimentation. For absorption through the oral cavities, it is often desirable to increase, e.g., at least double or triple, the dosage for through injection or administration through the gastrointestinal tract.

[0296] Particles. In some embodiments, dsRNA preparations can be incorporated into a particle, e.g., a microparticle. Microparticles can be produced by spray-drying, but may also be produced by other methods including lyophilization, evaporation, fluid bed drying, vacuum drying, or a combination of these techniques.

### Pharmaceutical Compositions

[0297] The dsRNA agents of the invention can be formulated for pharmaceutical use. The present invention further relates to a pharmaceutical composition comprising the dsRNA molecule as defined herein. Pharmaceutically acceptable compositions comprise a therapeutically-effective amount of one or more of the dsRNA molecules in any of the preceding embodiments, taken alone or formulated together with one or more pharmaceutically acceptable carriers (additives), excipient and/or diluents.

[0298] The pharmaceutical compositions may be specially formulated for administration in solid or liquid form, including those adapted for the following: (1) oral administration, for example, drenches (aqueous or non-aqueous solutions or suspensions), tablets, e.g., those targeted for buccal, sublingual, and systemic absorption, boluses, powders, granules, pastes for application to the tongue; (2) parenteral administration, for example, by subcutaneous, intramuscular, intravenous or epidural injection as, for example, a sterile solution or suspension, or sustained-release formulation; (3) topical application, for example, as a cream, ointment, or a controlled-release patch or spray applied to the skin; (4) intravaginally or intrarectally, for example, as a pessary, cream or foam; (5) sublingually; (6) ocularly; (7) transdermally; or (8) nasally. Delivery using subcutaneous or intravenous methods can be particularly advantageous.

[0299] The phrase “therapeutically-effective amount” as used herein means that amount of a compound, material, or composition comprising a compound of the invention which is effective for producing some desired therapeutic effect in at least a sub-population of cells in an animal at a reasonable benefit/risk ratio applicable to any medical treatment.

[0300] The phrase “pharmaceutically acceptable” is employed herein to refer to those compounds, materials, compositions, and/or dosage forms which are, within the scope of sound medical judgment, suitable for use in contact with the tissues of human beings and animals without excessive toxicity, irritation, allergic response, or other problem or complication, commensurate with a reasonable benefit/risk ratio.

[0301] The phrase “pharmaceutically-acceptable carrier” as used herein means a pharmaceutically-acceptable material, composition or vehicle, such as a liquid or solid filler, diluent, excipient, manufacturing aid (e.g., lubricant, talc magnesium, calcium or zinc stearate, or steric acid), or solvent encapsulating material, involved in carrying or transporting the subject compound from one organ, or portion of the body, to another organ, or portion of the body. Each carrier must be “acceptable” in the sense of being compatible with the other ingredients of the formulation and not injurious to the patient. Some examples of materials which can serve as pharmaceutically-acceptable carriers include: (1) sugars, such as lactose, glucose and sucrose; (2) starches, such as corn starch and potato starch; (3) cellulose, and its derivatives, such as sodium carboxymethyl cellulose, ethyl cellulose and cellulose acetate; (4) powdered tragacanth; (5) malt; (6) gelatin; (7) lubricating agents, such as magnesium state, sodium lauryl sulfate and talc; (8) excipients, such as cocoa butter and suppository waxes; (9) oils, such as peanut oil, cottonseed oil, safflower oil, sesame oil, olive oil, corn oil and soybean oil; (10) glycols, such as propylene glycol; (11) polyols, such as glycerin, sorbitol, mannitol and polyethylene glycol; (12) esters, such as ethyl oleate and ethyl laurate; (13) agar; (14) buffering agents, such as magnesium hydroxide and aluminum hydroxide; (15) alginic acid; (16) pyrogen-free water; (17) isotonic saline; (18) Ringer's solution; (19) ethyl alcohol; (20) pH buffered solutions; (21) polyesters, polycarbonates and/or polyanhydrides; (22) bulking agents, such as polypeptides and amino acids (23) serum component, such as serum albumin, HDL and LDL; and (22) other non-toxic compatible substances employed in pharmaceutical formulations.

[0302] The formulations may conveniently be presented in unit dosage form and may be prepared by any methods well known in the art of pharmacy. The amount of active ingredient which can be combined with a carrier material to produce a single dosage form will vary depending upon the host being treated, the particular mode of administration. The amount of active ingredient which can be combined with a carrier material to produce a single dosage form will generally be that amount of the compound which produces a therapeutic effect. Generally, out of one hundred percent, this amount will range from about 0.1 percent to about ninety-nine percent of active ingredient, preferably from about 5 percent to about 70 percent, most preferably from about 10 percent to about 30 percent.

[0303] In certain embodiments, a formulation of the present invention comprises an excipient selected from the group consisting of cyclodextrins, celluloses, liposomes, micelle forming agents, e.g., bile acids, and polymeric carriers, e.g., polyesters and polyanhydrides; and a compound of the present invention. In certain embodiments, an aforementioned formulation renders orally bioavailable a compound of the present invention.

[0304] The dsRNA agent preparation can be formulated in combination with another agent, e.g., another therapeutic agent or an agent that stabilizes a dsRNA, e.g., a protein that complexes with the dsRNA to form an iRNP. Still other agents include chelating agents, e.g., EDTA (e.g., to remove divalent cations such as Mg²⁺), salts, RNAse inhibitors (e.g., a broad specificity RNAse inhibitor such as RNAsin) and so forth.

[0305] Methods of preparing these formulations or compositions include the step of bringing into association a compound of the present invention with the carrier and, optionally, one or more accessory ingredients. In general, the formulations are prepared by uniformly and intimately bringing into association a compound of the present invention with liquid carriers, or finely divided solid carriers, or both, and then, if necessary, shaping the product.

[0306] In some cases, in order to prolong the effect of a drug, it is desirable to slow the absorption of the drug from subcutaneous or intramuscular injection. This may be accomplished by the use of a liquid suspension of crystalline or amorphous material having poor water solubility.

[0307] The rate of absorption of the drug then depends upon its rate of dissolution which, in turn, may depend upon crystal size and crystalline form. Alternatively, delayed absorption of a parenterally-administered drug form is accomplished by dissolving or suspending the drug in an oil vehicle.

[0308] The compounds according to the invention may be formulated for administration in any convenient way for use in human or veterinary medicine, by analogy with other pharmaceuticals.

[0309] The term “treatment” is intended to encompass therapy and cure. The patient receiving this treatment is any animal in need, including primates, in particular humans, and other mammals such as equines, cattle, swine and sheep; and poultry and pets in general.

[0310] Double-stranded RNA agents are produced in a cell in vivo, e.g., from exogenous DNA templates that are delivered into the cell. For example, the DNA templates can be inserted into vectors and used as gene therapy vectors. Gene therapy vectors can be delivered to a subject by, for example, intravenous injection, local administration (U.S. Pat. No. 5,328,470, which is incorporated by reference in its entirety), or by stereotactic injection (see, e.g., Chen et al. (1994) Proc. Natl. Acad. Sci. USA 91:3054-3057, which is incorporated by reference in its entirety). The pharmaceutical preparation of the gene therapy vector can include the gene therapy vector in an acceptable diluent, or can comprise a slow release matrix in which the gene delivery vehicle is imbedded. The DNA templates, for example, can include two transcription units, one that produces a transcript that includes the top strand of a dsRNA molecule and one that produces a transcript that includes the bottom strand of a dsRNA molecule. When the templates are transcribed, the dsRNA molecule is produced, and processed into siRNA agent fragments that mediate gene silencing.

[0311] The dsRNA molecule as defined herein or a pharmaceutical composition comprising a dsRNA molecule as defined herein can be administered to a subject using different routes of delivery. A composition that includes a dsRNA described herein can be delivered to a subject by a variety of routes. Exemplary routes include: intravenous, subcutaneous, topical, rectal, anal, vaginal, nasal, pulmonary, ocular.

[0312] The dsRNA molecule of the invention can be incorporated into pharmaceutical compositions suitable for administration. Such compositions typically include one or more species of dsRNAs and a pharmaceutically acceptable carrier. As used herein the language “pharmaceutically acceptable carrier” is intended to include any and all solvents, dispersion media, coatings, antibacterial and antifungal agents, isotonic and absorption delaying agents, and the like, compatible with pharmaceutical administration. The use of such media and agents for pharmaceutically active substances is well known in the art. Except insofar as any conventional media or agent is incompatible with the active compound, use thereof in the compositions is contemplated. Supplementary active compounds can also be incorporated into the compositions.

[0313] The compositions of the present invention may be administered in a number of ways depending upon whether local or systemic treatment is desired and upon the area to be treated. Administration may be topical (including ophthalmic, vaginal, rectal, intranasal, transdermal), oral or parenteral. Parenteral administration includes intravenous drip, subcutaneous, intraperitoneal or intramuscular injection, or intrathecal or intraventricular administration.

[0314] The route and site of administration may be chosen to enhance targeting. For example, to target muscle cells, intramuscular injection into the muscles of interest would be a logical choice. Lung cells might be targeted by administering the dsRNA in aerosol form. The vascular endothelial cells could be targeted by coating a balloon catheter with the dsRNA and mechanically introducing the dsRNA.

[0315] In one aspect, the invention features a method of administering a dsRNA molecule, e.g., a dsRNA agent described herein, to a subject (e.g., a human subject). In another aspect, the present invention relates to a dsRNA molecule as defined herein for use in inhibiting expression of a target gene in a subject. The method or the medical use includes administering a unit dose of the dsRNA molecule, e.g., a dsRNA agent described herein. In some embodiments, the unit dose is less than 10 mg per kg of bodyweight, or less than 10, 5, 2, 1, 0.5, 0.1, 0.05, 0.01, 0.005, 0.001, 0.0005, 0.0001, 0.00005 or 0.00001 mg per kg of bodyweight, and less than 200 nmole of RNA agent (e.g., about 4.4×10¹⁶ copies) per kg of bodyweight, or less than 1500, 750, 300, 150, 75, 15, 7.5, 1.5, 0.75, 0.15, 0.075, 0.015, 0.0075, 0.0015, 0.00075, 0.00015 nmole of RNA agent per kg of bodyweight.

[0316] The defined amount can be an amount effective to treat or prevent a disease or disorder, e.g., a disease or disorder associated with the target gene. The unit dose, for example, can be administered by injection (e.g., intravenous, subcutaneous or intramuscular), an inhaled dose, or a topical application. In some embodiments dosages may be less than 10, 5, 2, 1, or 0.1 mg/kg of body weight.

[0317] In some embodiments, the unit dose is administered less frequently than once a day, e.g., less than every 2, 4, 8 or 30 days. In another embodiment, the unit dose is not administered with a frequency (e.g., not a regular frequency). For example, the unit dose may be administered a single time.

[0318] In some embodiments, the effective dose is administered with other traditional therapeutic modalities. In some embodiments, the subject has a viral infection and the modality is an antiviral agent other than a dsRNA molecule, e.g., other than a siRNA agent. In another embodiment, the subject has atherosclerosis and the effective dose of a dsRNA molecule, e.g., a siRNA agent, is administered in combination with, e.g., after surgical intervention, e.g., angioplasty.

[0319] In some embodiments, a subject is administered an initial dose and one or more maintenance doses of a dsRNA molecule, e.g., a siRNA agent, (e.g., a precursor, e.g., a larger dsRNA molecule which can be processed into a siRNA agent, or a DNA which encodes a dsRNA molecule, e.g., a siRNA agent, or precursor thereof). The maintenance dose or doses can be the same or lower than the initial dose, e.g., one-half less of the initial dose. A maintenance regimen can include treating the subject with a dose or doses ranging from 0.01 μg to 15 mg/kg of body weight per day, e.g., 10, 1, 0.1, 0.01, 0.001, or 0.00001 mg per kg of bodyweight per day. The maintenance doses are, for example, administered no more than once every 2, 5, 10, or 30 days. Further, the treatment regimen may last for a period of time which will vary depending upon the nature of the particular disease, its severity and the overall condition of the patient. In certain embodiments the dosage may be delivered no more than once per day, e.g., no more than once per 24, 36, 48, or more hours, e.g., no more than once for every 5 or 8 days. Following treatment, the patient can be monitored for changes in his condition and for alleviation of the symptoms of the disease state. The dosage of the compound may either be increased in the event the patient does not respond significantly to current dosage levels, or the dose may be decreased if an alleviation of the symptoms of the disease state is observed, if the disease state has been ablated, or if undesired side-effects are observed.

[0320] The effective dose can be administered in a single dose or in two or more doses, as desired or considered appropriate under the specific circumstances. If desired to facilitate repeated or frequent infusions, implantation of a delivery device, e.g., a pump, semi-permanent stent (e.g., intravenous, intraperitoneal, intracisternal or intracapsular), or reservoir may be advisable.

[0321] In some embodiments, the composition includes a plurality of dsRNA molecule species. In another embodiment, the dsRNA molecule species has sequences that are non-overlapping and non-adjacent to another species with respect to a naturally occurring target sequence. In another embodiment, the plurality of dsRNA molecule species is specific for different naturally occurring target genes. In another embodiment, the dsRNA molecule is allele specific.

[0322] The dsRNA molecules of the invention described herein can be administered to mammals, particularly large mammals such as nonhuman primates or humans in a number of ways.

[0323] In some embodiments, the administration of the dsRNA molecule, e.g., a siRNA agent, composition is parenteral, e.g., intravenous (e.g., as a bolus or as a diffusible infusion), intradermal, intraperitoneal, intramuscular, intrathecal, intraventricular, intracranial, subcutaneous, transmucosal, buccal, sublingual, endoscopic, rectal, oral, vaginal, topical, pulmonary, intranasal, urethral or ocular. Administration can be provided by the subject or by another person, e.g., a health care provider. The medication can be provided in measured doses or in a dispenser which delivers a metered dose. Selected modes of delivery are discussed in more detail below.

[0324] The invention provides methods, compositions, and kits, for rectal administration or delivery of dsRNA molecules described herein

[0325] In particular embodiments, the present invention relates to the dsRNA molecules of the present invention for use in the methods described above.

[0326] Methods of inhibiting expression of the target gene

[0327] Embodiments of the invention also relate to methods for inhibiting the expression of a target gene. The method comprises the step of administering the dsRNA molecules in any of the preceding embodiments, in an amount sufficient to inhibit expression of the target gene. The present invention further relates to a use of a dsRNA molecule as defined herein for inhibiting expression of a target gene in a target cell. In a preferred embodiment, the present invention further relates to a use of a dsRNA molecule for inhibiting expression of a target gene in a target cell in vitro.

[0328] Another aspect the invention relates to a method of modulating the expression of a target gene in a cell, comprising providing to said cell a dsRNA molecule of this invention. In some embodiments, the target gene is selected from the group consisting of Factor VII, Eg5, PCSK9, TPX2, apoB, SAA, TTR, RSV, PDGF beta gene, Erb-B gene, Src gene, CRK gene, GRB2 gene, RAS gene, MEKK gene, JNK gene, RAF gene, Erk1/2 gene, PCNA (p21) gene, MYB gene, JUN gene, FOS gene, BCL-2 gene, hepcidin, Activated Protein C, Cyclin D gene, VEGF gene, EGFR gene, Cyclin A gene, Cyclin E gene, WNT-1 gene, beta-catenin gene, c-MET gene, PKC gene, NFKB gene, STAT3 gene, survivin gene, Her2/Neu gene, topoisomerase I gene, topoisomerase II alpha gene, mutations in the p73 gene, mutations in the p21 (WAF1/CIP1) gene, mutations in the p27 (KIP1) gene, mutations in the PPMID gene, mutations in the RAS gene, mutations in the caveolin I gene, mutations in the MIB I gene, mutations in the MTAI gene, mutations in the M68 gene, mutations in tumor suppressor genes, and mutations in the p53 tumor suppressor gene.

[0329] In particular embodiments, the present invention relates to the dsRNA molecules of the present invention for use in the methods described above.

[0330] Exemplary embodiments of the various aspects can be described by the following lettered embodiments:
[0331] Embodiment A: A dsRNA agent comprising a sense strand and antisense, each strand independently having a length of 15-35 nucleotides, wherein the sense strand comprises a 2′-fluoro nucleotide at position 10, counting from 5′-end of the sense strand, and wherein the antisense strand comprises a 2′-deoxy nucleotide at positions 5 and 7, counting from 5′-end of the antisense strand.
[0332] Embodiment B: The dsRNA agent of Embodiment A, wherein the sense strand further comprises a 2′-fluoro nucleotide at position 11, counting from 5′-end of the sense strand.
[0333] Embodiment C: The dsRNA agent of Embodiment A or B, wherein the sense strand further comprises a 2′-fluoro nucleotide at position 9, counting from 5′-end of the sense strand.
[0334] Embodiment D: The dsRNA of any one of Embodiments A to C, wherein the sense strand further comprises a 2′-fluoro nucleotide at positions 9 and 11, counting from 5-end of the sense strand.
[0335] Embodiment E: The dsRNA agent of any one of Embodiments A to D, wherein the sense strand comprises a 2′-fluoro nucleotide at positions 8 and 9, counting from 5-end of the sense strand.
[0336] Embodiment F: The dsRNA agent of any one of Embodiments A to E, wherein the sense strand comprises a 2′-fluoro nucleotide at positions 11 and 12, counting from 5-end of the sense strand.
[0337] Embodiment G: The dsRNA agent of any one of Embodiments A to F, wherein the sense strand comprises at least one 2′-OMe nucleotide.
[0338] Embodiment H: The dsRNA agent of any one of Embodiments A to G, wherein the antisense strand comprises a 2′-deoxy nucleotide at position 2, counting from 5′-end of the antisense strand.
[0339] Embodiment I: The dsRNA agent of any one of Embodiments A to H, wherein the antisense strand comprises a 2′-deoxy nucleotide at positions 2, 5 and 7, counting from 5′-end of the antisense strand
[0340] Embodiment J: The dsRNA agent of any one of Embodiments A to I, wherein the antisense strand comprises at least one 2′-fluoro nucleotide.
[0341] Embodiment K: The dsRNA agent of any one of Embodiments A to J, wherein the antisense strand comprises a 2′-fluoro nucleotide at position 14 of the antisense strand, counting from 5′-end of the antisense strand.
[0342] Embodiment L: The dsRNA agent of any one of Embodiments A to K, wherein the dsRNA agent comprises a ligand.
[0343] Embodiment M: The dsRNA agent of any one of Embodiments A to L, wherein the sense strand comprises a ligand.
[0344] Embodiment N: The dsRNA agent of Embodiment L or M, wherein the ligand is an ASGPR ligand.
[0345] Embodiment O: The dsRNA agent of any one of Embodiments A to N, wherein the dsRNA agent comprises at least two phosphorothioate internucleotide linkages.
[0346] Embodiment P: The dsRNA agent of any one of Embodiments A to O, wherein the sense strand comprises at least two phosphorothioate internucleotide linkages between the first five nucleotides counting from the 5′ end of the sense strand.
[0347] Embodiment Q: The dsRNA agent of any one of Embodiments A to P, wherein the antisense strand comprises at least two phosphorothioate internucleotide linkages between the first five nucleotides counting from the 5′ end of the antisense strand and at least two phosphorothioate internucleotide linkages between the first five nucleotides counting from the 3′ end of the antisense strand.
[0348] Embodiment R: The dsRNA agent of any one of Embodiments A to Q, wherein the dsRNA has a duplex region of from 18 to about 25 basepairs.
[0349] Embodiment S: The dsRNA agent of any one of Embodiments A to R, wherein the sense strand is 18-23 nucleotides in length.
[0350] Embodiment T: The dsRNA agent of any one of Embodiments A to S, wherein the antisense strand is 18-25 nucleotides in length.
[0351] Embodiment U: A dsRNA agent comprising a sense strand and an antisense strand, wherein the sense strand is 18-23 nucleotides in length and comprises a 2′-fluoro nucleotide at position 10, counting from 5′-end of the sense strand and a 2′-fluoro nucleotide at position 9 or 11, counting from 5′-end of the sense strand, and wherein the antisense strand is 18-25 nucleotide in length and comprises a 2′-deoxy nucleotide at positions 5 and 7, counting from 5′-end of the antisense strand.
[0352] Embodiment V: A dsRNA agent comprising a sense strand and an antisense strand, wherein the sense strand is 18-23 nucleotides in length and comprises a 2′-fluoro nucleotide at positions 9, 10 and 11, counting from 5′-end of the sense strand, and wherein the antisense is 18-25 nucleotide in length and comprises a 2′-deoxy nucleotide at position 5 and 7, counting from 5′-end of the antisense strand.

[0353] Additional exemplary embodiments can be described by one or more of the following numbered embodiments:
[0354] Embodiment 1: dsRNA agent comprising a sense strand and antisense, each strand independently having a length of 15-35 nucleotides wherein each nucleotide is independently modified or unmodified, wherein: the sense strand comprises a 2′-fluoro nucleotide at position 10, counting from 5′-end of the sense strand, and the antisense strand comprises a 2′-deoxy nucleotide at positions 2, 5, 7 and 12, counting from 5′-end of the antisense strand, and wherein: (i) the antisense strand comprises a 2′-fluoro nucleotide at position 14 and a nucleotide other than a 2′-deoxy or 2′-fluoro nucleotide at position 16, counting from the 5′-end of the antisense strand; or (ii) the antisense strand comprises a 2′-deoxy nucleotide at position 14 or 16, counting from the 5′-end of the antisense strand, and the sense strand comprises a nucleotide other than a 2′-fluoro nucleotide at position 7, counting from the 5′-end of the sense strand.
[0355] Embodiment 2: The dsRNA agent of Embodiment 1, wherein the sense strand further comprises a 2′-fluoro nucleotide at position 11, counting from 5′-end of the sense strand.
[0356] Embodiment 3: The dsRNA agent of Embodiment 1 or 2, wherein the sense strand further comprises a 2′-fluoro nucleotide at position 9, counting from 5′-end of the sense strand.
[0357] Embodiment 4: The dsRNA of any one of Embodiments 1-3, wherein the sense strand further comprises a 2′-fluoro nucleotide at positions 9 and 11, counting from 5-end of the sense strand.
[0358] Embodiment 5: The dsRNA agent of any one of Embodiments 1-4, wherein the sense strand comprises a 2′-fluoro nucleotide at positions 8 and 9, counting from 5-end of the sense strand.
[0359] Embodiment 6: The dsRNA agent of any one of Embodiments 1-5, wherein the sense strand comprises a 2′-fluoro nucleotide at positions 11 and 12, counting from 5-end of the sense strand.
[0360] Embodiment 7: The dsRNA agent of any one of Embodiments 1-6, wherein the sense strand comprises a nucleotide other than a 2′-fluoro at position 7, counting from the 5′-end of the sense strand.
[0361] Embodiment 8: The dsRNA of any one of Embodiments 1-7, wherein the sense strand comprises a 2′-fluoro nucleotide at positions 9, 10 and 11, and a nucleotide other than a 2′-fluoro at position 7, counting from the 5′-end of the sense strand
[0362] Embodiment 9: The dsRNA agent of any one of Embodiments 1-8, wherein the sense strand comprises at least one 2′-OMe nucleotide.
[0363] Embodiment 10: The dsRNA agent of any one of Embodiments 1-9, wherein the sense strand comprises a 2′-OMe nucleotide at position 7, counting from the 5′-end of the sense strand.
[0364] Embodiment 11: The dsRNA agent of any one of Embodiments 1-10, wherein the sense strand comprises a 2′-fluoro nucleotide at positions 9, 10 and 11, and a 2′-OMe nucleotide at position 7, counting from the 5′-end of the sense strand.
[0365] Embodiment 12: The dsRNA agent of any one of Embodiments 1-11, wherein the antisense strand comprises a 2′-fluoro nucleotide at position 14 of the antisense strand, and a nucleotide other than a 2′-deoxy or 2′-fluoro nucleotide at position 16, counting from 5′-end of the antisense strand.
[0366] Embodiment 13: The dsRNA agent of any one of Embodiments 1-12, wherein the antisense strand comprises a 2′-deoxy nucleotide at position 2, 5, 7, and 12, a 2′-fluoro nucleotide at position 14 and a nucleotide other than a 2′-deoxy or 2′-fluoro nucleotide at position 16, counting from the 5′-end of the antisense strand.
[0367] Embodiment 14: The dsRNA agent of any one of Embodiments 1-13, wherein the antisense strand comprises a 2′-OMe nucleotide at position 16, counting from the 5′-end of the antisense strand.
[0368] Embodiment 15: The dsRNA agent of any one of Embodiments 1-14, wherein the antisense strand comprises a 2′-deoxy nucleotide at position 2, 5, 7, and 12, a 2′-fluoro nucleotide at position 14, and a 2′-OMe nucleotide at position 16, counting from the 5′-end of the antisense strand.
[0369] Embodiment 16: The dsRNA agent of any one of Embodiments 1-11, wherein the antisense strand comprises a 2′-deoxy nucleotide at position 14 of the antisense strand, counting from 5′-end of the antisense strand, and the sense strand comprises a nucleotide other than a 2′-fluoro nucleotide at position 7, counting from 5′-end of the sense strand.
[0370] Embodiment 17: The dsRNA agent of any one Embodiments 1-11 or 16, wherein the antisense strand comprises a 2′-deoxy nucleotide at position 14 of the antisense strand, counting from 5′-end of the antisense strand, and the sense strand comprises a 2′-OMe nucleotide at position 7, counting from 5′-end of the sense strand.
[0371] Embodiment 18: The dsRNA agent of any one Embodiments 1-11 or 16-17, wherein the antisense strand comprises a 2′-deoxy nucleotide at position 2, 5, 7, 12 and 14 of the antisense strand, counting from 5′-end of the antisense strand, and the sense strand comprises a nucleotide other than 2′-fluoro nucleotide at position 7, counting from 5′-end of the sense strand.
[0372] Embodiment 19: The dsRNA agent of any one of Embodiments 1-18, wherein the antisense strand comprises a 2′-deoxy nucleotide at position 16 of the antisense strand, counting from 5′-end of the antisense strand, and the sense strand comprises a nucleotide other than a 2′-fluoro nucleotide at position 7, counting from 5′-end of the sense strand.
[0373] Embodiment 20: The dsRNA agent of any one of Embodiments 1-19, wherein the antisense strand comprises a 2′-deoxy nucleotide at position 16 of the antisense strand, counting from 5′-end of the antisense strand, and the sense strand comprises 2′-OMe nucleotide at position 7, counting from 5′-end of the sense strand.
[0374] Embodiment 21: The dsRNA agent of any one of Embodiments 1-20, wherein the antisense strand comprises a 2′-deoxy nucleotide at position 2, 5, 7, 12 and 16 of the antisense strand, counting from 5′-end of the antisense strand, and the sense strand comprises a nucleotide other than a 2′-fluoro at position 7, counting from 5′-end of the sense strand.
[0375] Embodiment 22: The dsRNA agent of any one of Embodiments 1-11 or 16-21, wherein the antisense strand comprises a 2′-deoxy nucleotide at position 2, 5, 7, 12, 14 and 16 of the antisense strand, counting from 5′-end of the antisense strand, and the sense strand comprises a nucleotide other than a 2′-fluoro at position 7, counting from 5′-end of the sense strand.
[0376] Embodiment 23: The dsRNA agent of any one of Embodiments 1-11 or 16-22, wherein the antisense strand comprises a 2′-deoxy nucleotide at position 2, 5, 7, 12, 14 and 16, and the sense strand comprises a nucleotide other than a 2′-fluoro at position 7, counting from 5′-end of the sense strand.
[0377] Embodiment 24: The dsRNA agent of any one of Embodiments 1-15 or 19-20, wherein the antisense strand comprises a 2′-deoxy nucleotide at position 2, 5, 7, 12, and 16 and a 2′-fluoro at postion 14 of the antisense strand, counting from 5′-end of the antisense strand, and the sense strand comprises a nucleotide other than a 2′-fluoro at position 7, counting from 5′-end of the sense strand.
[0378] Embodiment 25: The dsRNA agent of any one of Embodiments 1-15, 19-20 or 24, wherein the antisense strand comprises a 2′-deoxy nucleotide at position 2, 5, 7, 12, and 16 and a 2′-fluoro at postion 14 of the antisense strand, counting from 5′-end of the antisense strand, and the sense strand comprises a 2′-OMe nucleotide at position 7, counting from 5′-end of the sense strand.
[0379] Embodiment 26: The dsRNA agent of any one of Embodiments 1-25, wherein the dsRNA agent comprises a ligand.
[0380] Embodiment 27: The dsRNA agent of any one of Embodiments 1-26, wherein the sense strand comprises a ligand.
[0381] Embodiment 28: The dsRNA agent of Embodiment 27, wherein the ligand is at 3′-end of the sense strand.
[0382] Embodiment 29: The dsRNA agent of Embodiment 27, wherein the ligand is at 5′-end of the sense strand.
[0383] Embodiment 30: The dsRNA agent of any one of Embodiments 26-29, wherein the ligand comprises an ASGPR ligand.
[0384] Embodiment 31: The dsRNA agent of any one of Embodiments 26-29, wherein the ligand is lipophilic group.
[0385] Embodiment 32: The dsRNA agent of Embodiment 31, wherein the ligand is a C10-30aliphatic group.
[0386] Embodiment 33: The dsRNA agent of Embodiment 32, wherein the C10-30aliphatic

[0387] group is a C₁₀₋₃₀alkyl group.
[0388] Embodiment 34: The dsRNA agent of Embodiment 33, wherein the C₁₀₋₃₀alkyl group is a straight-chain or branched tetradecyl, hexadecyl, octadecyl, icosyl, docosyl, or tetracosyl group.
[0389] Embodiment 35: The dsRNA agent of any one of Embodiments 27, wherein the ligand is conjugated to a non-terminal nucleotide of the sense strand.
[0390] Embodiment 36: The dsRNA agent of Embodiment 35, wherein the ligand is conjugated to the 2′-position of a non-terminal nucleotide of the sense strand, optionally conjugated to one of positions 5, 6, 7, or 8 of the sense strand, counting from the 5′ end).
[0391] Embodiment 37: The dsRNA agent of Embodiment 26-36, wherein the ligand comprises an abasic nucleotide, optionally the abasic nucleotide is an inverted nucleotide and linked via a 5′->5′ or a 3′->3′ linkage to a strand of the dsRNA agent.
[0392] Embodiment 38: The dsRNA agent of any one of Embodiments 26-37, wherein the ligand is attached at the 3′-end of the sense strand.
[0393] Embodiment 39: The dsRNA agent of Embodiment 38, wherein the ligand is attached at the 3′-end of the sense strand via a 3′->3′ linkage.
[0394] Embodiment 40: The dsRNA agent of any one of Embodiments 1-39, wherein the dsRNA comprises two ligands.
[0395] Embodiment 41: The dsRNA of Embodiment 40, wherein the sense strand comprises a first ligand attached at the 3′-end of the sense strand and a second ligand attached at the 5′-end of the sense strand.
[0396] Embodiment 42: The dsRNA of Embodiment 41, wherein the first ligand comprises an abasic nucleotide and the second ligand comprises an ASGPR ligand, optionally the abasic nucleotide is an inverted nucleotide and linked via a 3′->3′ linkage to the sense strand.
[0397] Embodiment 43: The dsRNA agent of any one of Embodiments 1-42, wherein the dsRNA agent comprises at least two phosphorothioate internucleotide linkages.
[0398] Embodiment 44: The dsRNA agent of any one of Embodiments 1-43, wherein the sense strand comprises at least two phosphorothioate internucleotide linkages between the first five nucleotides counting from the 5′ end of the sense strand.
[0399] Embodiment 45: The dsRNA agent of any one of Embodiments 1-44, wherein the antisense strand comprises at least two phosphorothioate internucleotide linkages between the first five nucleotides counting from the 5′ end of the antisense strand and at least two phosphorothioate internucleotide linkages between the first five nucleotides counting from the 3′ end of the antisense strand.
[0400] Embodiment 46: The dsRNA agent of any one of Embodiments 1-45, wherein the dsRNA has a duplex region of from 18 to about 25 basepairs.
[0401] Embodiment 47: The dsRNA agent of any one of Embodiments 1-46, wherein the sense strand is 18-23 nucleotides in length.
[0402] Embodiment 48: The dsRNA agent of any one of Embodiments 1-47, wherein the antisense strand is 18-25 nucleotides in length.
[0403] Embodiment 49: A dsRNA agent comprising a sense strand and an antisense strand, wherein the sense strand is 18-23 nucleotides in length and comprises a 2′-fluoro nucleotide at position 10, counting from 5′-end of the sense strand and a 2′-fluoro nucleotide at position 9 or 11, counting from 5′-end of the sense strand, and the antisense strand is 18-25 nucleotide in length and comprises a 2′-deoxy nucleotide at positions 2, 5, 7, and 12, counting from 5′-end of the antisense strand, wherein: (i) the antisense strand comprises a 2′-fluoro nucleotide at position 14 and a nucleotide other than a 2′-deoxy or 2′-fluoro nucleotide at position 16, counting from the 5′-end of the antisense strand; or (ii) the antisense strand comprises a 2′-deoxy nucleotide at position 14 or 16, counting from the 5′-end of the antisense strand, and the sense strand comprises a nucleotide other than a 2′-fluoro nucleotide at position 7, counting from the 5′-end of the sense strand.
[0404] Embodiment 50: A dsRNA agent comprising a sense strand and an antisense strand, wherein the sense strand is 18-23 nucleotides in length and comprises a 2′-fluoro nucleotide at positions 9, 10 and 11, counting from 5′-end of the sense strand, and the antisense is 18-25 nucleotide in length and comprises a 2′-deoxy nucleotide at position 2, 5, 7, and 12, counting from 5′-end of the antisense strand, wherein: (i) the antisense strand comprises a 2′-fluoro nucleotide at position 14 and a nucleotide other than a 2′-deoxy or 2′-fluoro nucleotide at position 16, counting from the 5′-end of the antisense strand; or (ii) the antisense strand comprises a 2′-deoxy nucleotide at position 14 or 16, counting from the 5′-end of the antisense strand, and the sense strand comprises a nucleotide other than a 2′-fluoro nucleotide at position 7, counting from the 5′-end of the sense strand.
[0405] Embodiment 51: The dsRNA agent of any one of Embodiments 1-50, comprising a phosphate mimic at the 5′-end of the antisense strand.
[0406] Embodiment 52: The dsRNA agent of Embodiment 51, wherein the phosphate mimic is a 5′-E-vinyl phosphonate.
[0407] Embodiment 53: The dsRNA agent of Embodiment 52, wherein the phosphate mimic is a 5′-cyclopropylphosphonate having the structure:

[chemical structure]

where * is a bond to C₅ position of the nucleotide at the 5′-terminus.
[0408] Embodiment 54: The dsRNA agent of any one of Embodiments 1-53, wherein remaining nucleotides (i.e., nucleotides at positions not otherwise defined) in the sense strand are unmodified nucleotides or modified nucleotides, optioally selected from the groups consisting of of 2′-OMe, 2′-F, 2′-H, and an 2′-O—C10-30aliphatic group, provided no more than one modified nucleotide is an 2′-O—C10-30aliphatic group.
[0409] Embodiment 55: The dsRNA agent of any one of Embodiments 1-54, wherein remaining nucleotides (i.e., nucleotides at positions not otherwise defined) in the sense strand are modified nucleotides selected from the group consisting of 2′-OMe, 2′-F, 2′-H, and an 2′-O—C10-30aliphatic group, provided no more than one modified nucleotide is an 2′-O—C10-30aliphatic group.
[0410] Embodiment 56: The dsRNA agent of any one of Embodiments 1-55, wherein remaining nucleotides (i.e., nucleotides at positions not otherwise defined) in the antisense strand are unmodified nucleotides or modified nucleotides, optioally selected from the group consisting of 2′-OMe, 2′-F, 2′-H, GNA and 3′-RNA, the 3′-RNA being optionally 3′-OH, provided no more than one modified nucleotide is GNA or 3′-RNA.
[0411] Embodiment 57: The dsRNA agent of any one of Embodiments 1-56, wherein remaining nucleotides (i.e., nucleotides at positions not otherwise defined) in the antisense strand are modified nucleotides selected from the group consisting of 2′-OMe, 2′-F, 2′-H, GNA, and 3′-RNA, the 3′-RNA being optionally 3′-OH, provided no more than one modified nucleotide is GNA or 3′-RNA.

### Some Selected Definitions

[0412] For convenience, certain terms employed herein, in the specification, examples and appended claims are collected herein. Unless stated otherwise, or implicit from context, the following terms and phrases include the meanings provided below. Unless explicitly stated otherwise, or apparent from context, the terms and phrases below do not exclude the meaning that the term or phrase has acquired in the art to which it pertains. The definitions are provided to aid in describing particular embodiments, and are not intended to limit the claimed invention, because the scope of the invention is limited only by the claims. Further, unless otherwise required by context, singular terms shall include pluralities and plural terms shall include the singular.

[0413] Unless defined otherwise, all technical and scientific terms used herein have the same meaning as those commonly understood to one of ordinary skill in the art to which this invention pertains. Although any known methods, devices, and materials may be used in the practice or testing of the invention, the methods, devices, and materials in this regard are described herein.

[0414] Further, the practice of the present invention can employ, unless otherwise indicated, conventional techniques of molecular biology (including recombinant techniques), microbiology, cell biology, biochemistry, and immunology, which are within the skill of the art. Such techniques are explained fully in the literature, such as, “Molecular Cloning: A Laboratory Manual”, second edition (Sambrook et al., 1989); “Oligonucleotide Synthesis” (M. J. Gait, ed., 1984); “Animal Cell Culture” (R. I. Freshney, ed., 1987); “Methods in Enzymology” (Academic Press, Inc.); “Current Protocols in Molecular Biology” (F. M. Ausubel et al., eds., 1987, and periodic updates); “PCR: The Polymerase Chain Reaction”, (Mullis et al., ed., 1994); “A Practical Guide to Molecular Cloning” (Perbal Bernard V., 1988); “Phage Display: A Laboratory Manual” (Barbas et al., 2001).

[0415] Where a range of values is provided, it is understood that each intervening value, to the tenth of the unit of the lower limit unless the context clearly dictates otherwise, between the upper and lower limit of that range and any other stated or intervening value in that stated range, is encompassed within the invention. The upper and lower limits of these smaller ranges may independently be included in the smaller ranges and are also encompassed within the invention, subject to any specifically excluded limit in the stated range. Where the stated range includes one or both of the limits, ranges excluding either or both of those included limits are also included in the invention.

[0416] Certain ranges are presented herein with numerical values being preceded by the term “about.” The term “about” is used herein to provide literal support for the exact number that it precedes, as well as a number that is near to or approximately the number that the term precedes. In determining whether a number is near to or approximately a specifically recited number, the near or approximating unrecited number may be a number which, in the context in which it is presented, provides the substantial equivalent of the specifically recited number.

[0417] As used herein the term “comprising” or “comprises” is used in reference to compositions, methods, and respective component(s) thereof, that are essential to the invention, yet open to the inclusion of unspecified elements, whether essential or not.

[0418] The singular terms “a,” “an,” and “the” include plural referents unless context clearly indicates otherwise. Similarly, the word “or” is intended to include “and” unless the context clearly indicates otherwise. It is further noted that the claims can be drafted to exclude any optional element. As such, this statement is intended to serve as antecedent basis for use of such exclusive terminology as “solely,” “only” and the like in connection with the recitation of claim elements, or use of a “negative” limitation.

[0419] As used herein, the terms “dsRNA”, “siRNA”, and “iRNA agent” are used interchangeably to refer to agents that can mediate silencing of a target RNA, e.g., mRNA, e.g., a transcript of a gene that encodes a protein. For convenience, such mRNA is also referred to herein as mRNA to be silenced. Such a gene is also referred to as a target gene. In general, the RNA to be silenced is an endogenous gene, exogenous gene or a pathogen gene. In addition, RNAs other than mRNA, e.g., tRNAs, and viral RNAs, can also be targeted.

[0420] As used herein, the phrase “mediates RNAi” refers to the ability to silence, in a sequence specific manner, a target gene, e.g., mRNA. While not wishing to be bound by theory, it is believed that silencing uses the RNAi machinery or process and a guide RNA, e.g., antisense strand of a dsRNA, where the antisense strand is 21 to 23 nucleotides in length.

[0421] As used herein, “specifically hybridizable” and “complementary” are terms which are used to indicate a sufficient degree of complementarity such that stable and specific binding occurs between a compound of the invention and a target RNA molecule. Specific binding requires a sufficient degree of complementarity to avoid non-specific binding of the oligomeric compound to non-target sequences under conditions in which specific binding is desired, i.e., under physiological conditions in the case of assays or therapeutic treatment, or in the case of in vitro assays, under conditions in which the assays are performed. The non-target sequences typically differ by at least 5 nucleotides.

[0422] In some embodiments, a dsRNA molecule of the invention is “sufficiently complementary” to a target RNA, e.g., a target mRNA, such that the dsRNA molecule silences production of protein encoded by the target mRNA. In another embodiment, the dsRNA molecule of the invention is “exactly complementary” to a target RNA, e.g., the target RNA and the dsRNA duplex agent anneal, for example to form a hybrid made exclusively of Watson-Crick base pairs in the region of exact complementarity. A “sufficiently complementary” target RNA can include an internal region (e.g., of at least 10 nucleotides) that is exactly complementary to a target RNA. Moreover, in some embodiments, the dsRNA molecule of the invention specifically discriminates a single-nucleotide difference. In this case, the dsRNA molecule only mediates RNAi if exact complementary is found in the region (e.g., within 7 nucleotides of) the single-nucleotide difference.

[0423] The term ‘BNA’ refers to bridged nucleic acid, and is often referred as constrained or inaccessible RNA. BNA can contain a 5-, 6-membered, or even a 7-membered bridged structure with a “fixed” C3′-endo sugar puckering. The bridge is typically incorporated at the 2′-, 4′-position of the ribose to afford a 2′, 4′-BNA nucleotide (e.g., LNA, or ENA). Examples of BNA nucleotides include the following nucleosides:

[chemical structure]

[0424] The term ‘LNA’ refers to locked nucleic acid, and is often referred as constrained or inaccessible RNA. LNA is a modified RNA nucleotide. The ribose moiety of an LNA nucleotide is modified with an extra bridge (e.g., a methylene bridge or an ethylene bridge) connecting the 2′ hydroxyl to the 4′ carbon of the same ribose sugar. For instance, the bridge can “lock” the ribose in the 3′-endo North) conformation:

[chemical structure]

[0425] The term ‘ENA’ refers to ethylene-bridged nucleic acid, and is often referred as constrained or inaccessible RNA.

[0426] The “cleavage site” herein means the backbone linkage in the target gene or the sense strand that is cleaved by the RISC mechanism by utilizing the iRNA agent. And the target cleavage site region comprises at least one or at least two nucleotides on both side of the cleavage site. For the sense strand, the cleavage site is the backbone linkage in the sense strand that would get cleaved if the sense strand itself was the target to be cleaved by the RNAi mechanism. The cleavage site can be determined using methods known in the art, for example the 5′-RACE assay as detailed in Soutschek et al., Nature (2004) 432, 173-178, which is incorporated by reference in its entirety. As is well understood in the art, the cleavage site region for a conical double stranded RNAi agent comprising two 21-nucleotides long strands (wherein the strands form a double stranded region of 19 consecutive base pairs having 2-nucleotide single stranded overhangs at the 3′-ends), the cleavage site region corresponds to positions 9-12 from the 5′-end of the sense strand.

[0427] The terms “decrease”, “reduced”, “reduction”, or “inhibit” are all used herein to mean a decrease by a statistically significant amount. In some embodiments, “reduce,” “reduction” or “decrease” or “inhibit” typically means a decrease by at least 10% as compared to a reference level (e.g. the absence of a given treatment) and can include, for example, a decrease by at least about 10%, at least about 20%, at least about 25%, at least about 30%, at least about 35%, at least about 40%, at least about 45%, at least about 50%, at least about 55%, at least about 60%, at least about 65%, at least about 70%, at least about 75%, at least about 80%, at least about 85%, at least about 90%, at least about 95%, at least about 98%, at least about 99%, or more. As used herein, “reduction” or “inhibition” does not encompass a complete inhibition or reduction as compared to a reference level. “Complete inhibition” is a 100% inhibition as compared to a reference level. A decrease can be preferably down to a level accepted as within the range of normal for an individual without a given disorder.

[0428] As used herein, a “central region” of a strand refers to positions 5-17, e.g., positions 6-16, positions 6-15, positions 6-14, positions 6-13, positions 6-12, positions 7-15, positions 7-14, positions 7-13, positions, 7-12, positions 8-16, positions 8-15, positions 8-14, positions 8-13, positions 8-12, positions 9-16, positions 9-15, positions 9-14, positions 9-13, positions 9-12, positions 10-16, positions 10-15, positions 10-14, positions 10-13 or positions 10-12, counting from the 5′-end of the strand. For example, the central region of a strand means positions 5, 6, 7, 8, 9, 10, 11, 12, 13, 14, 15, 16 or 17 of the strand. A preferred central region for the sense strand is positions 6, 7, 8, 9, 10, 11, 12, 13, and 14, counting from the 5′-end of the sense strand. A more preferred central region for the sense strand is positions 7, 8, 9, 10, 11, 12 and 13, counting from the 5′-end of the sense strand. A preferred central region for the antisense strand is positions 9, 10, 11, 12, 13, 14, 15 16 and 17, counting from 5′-end of the antisense strand. A more preferred central region for the antisense strand is positions 10, 11, 12, 13, 14, 15 and 16, counting from 5′-end of the antisense strand.

[0429] As will be apparent to those of skill in the art upon reading this disclosure, each of the individual aspects described and illustrated herein has discrete components and features which can be readily separated from or combined with the features of any of the other several aspects without departing from the scope or spirit of the present invention. Any recited method can be carried out in the order of events recited or in any other order which is logically possible.

[0430] The invention is further illustrated by the following examples, which should not be construed as further limiting. The contents of all references, pending patent applications and published patents, cited throughout this application are hereby expressly incorporated by reference.

### Examples

### Oligonucleotide Synthesis and Purification

[0431] All oligonucleotides were prepared on a MerMade 192 synthesizer on a 1 μmole scale using universal or custom supports. All phosphoramidites were used at a concentration 100 mM in 100% Acetonitrile or 9:1 Acetonitrile: DMF with a standard protocol for 2-cyanoethyl phosphoramidites, except that the coupling time was extended to 400 seconds. Oxidation of the newly formed linkages was achieved using a solution of 50 mM 12 in 9:1 Acetonitrile: Water to create phosphate linkages and 100 mM DDTT in 9:1 Pyridine: Acetonitrile to create phosphorothioate linkages. After the trityl-off synthesis, columns were incubated with 150 μL of 40% aqueous Methylamine for 45 minutes and the solution drained via vacuum into a 96-well plate. After repeating the incubation and draining with a fresh portion of aqueous Methylamine, the plate containing crude oligonucleotide solution was sealed and shaken at room temperature for an additional 60 minutes to completely remove all protecting groups. Precipitation of the crude oligonucleotides was accomplished via the addition of 1.2 mL of 9:1 Acetonitrile: EtOH to each well followed by incubation at −20° C. overnight. The plate was then centrifuged at 3000 RPM for 45 minutes, the supernatant removed from each well, and the pellets resuspended in 950 μL of 20 mM aqueous NaOAc. Each crude solution was finally desalted over a GE Hi-Trap Desalting Column (Sephadex G25 Superfine) using water to elute the final oligonucleotide products. All identities and purities were confirmed using ESI-MS and IEX HPLC, respectively.

### Cell Culture and Transfections

[0432] Primary Mouse or Cyno Hepatocytes (Thermo Fisher Scientific/Gibco) were transfected by adding 4.9 μL of Opti-MEM plus 0.1 μL of Lipofectamine RNAiMax per well (Invitrogen, cat #13778-150) to 5 μL of siRNA duplexes per well into a 384-well plate and incubated at room temperature for 15 minutes. 40 μL of Dulbecco's Modified Eagle Medium (PCH) or William's Medium (PMH) containing ˜5 ×10³ cells were then added to the siRNA mixture. Cells were incubated for 24 hours at 37° C. and then processed for RNA purification. Experiments were performed at 10 nM, 1 nM, and 0.1 nM doses of siRNA.

[0433] Sequences of parent dsRNA molecules are shown in Tables 1-3 and abbrevations used in the sequences are summarized in Table 4.

TABLE 1
Sequences of parent dsRNA molecules

| | | | SEQ | | SEQ |
|---|---|---|---|---|---|
| | Duplex | | ID | | ID |
| target | ID | Sense Sequence (5′→3′) | NO: | Antisense Sequence (5′→3′) | NO: |
| AGT | AD-67327 | uscsucccAfcCfUfUfuucuucuaauL96 | 5 | asUfsuagAfagaaaagGfuGfggagascsu | 37 |
| AGT | AD-85435 | csascaauGfaGfAfGfuaccugugaaL96 | 6 | usUfscacagguacucUfcAfuugugsgsa | 38 |
| AGT | AD-85438 | cscsucaaCfuGfGfAfugaagaaacuL96 | 7 | asGfsuuucuucauccAfgUfugaggsgsa | 39 |
| AGT | AD-85446 | gscsugagAfaGfAfUfugacagguuaL96 | 8 | usAfsaccugucaaucUfuCfucagcsasg | 40 |
| F9 | AD-674282 | gsasagcaCfcUfGfAfacaccgucauL96 | 9 | asUfsgacGfgUfGfuucaGfgUfgcuucsasu | 41 |
| F9 | AD-674283 | asasugugCfaGfUfUfuuccuugauuL96 | 10 | asAfsucaAfgGfAfaaacUfgCfacauuscsg | 42 |
| F9 | AD-674287 | uscscuugUfuUfAfAfaugguggaauL96 | 11 | asUfsuccAfcCfAfuuuaAfaCfaaggasusu | 43 |
| F9 | AD-674289 | asasaaugGfcAfGfGfugcaagcaguL96 | 12 | asCfsugcUfuGfCfaccuGfcCfauuuususa | 44 |
| F9 | AD-674293 | uscsauucAfaGfAfUfgacaucacuuL96 | 13 | asAfsgugAfuGfUfcaucUfuGfaaugasasu | 45 |
| F9 | AD-674299 | gsasacugGfaUfAfAfaccuuuaauaL96 | 14 | usAfsuuaAfaGfGfuuuaUfcCfaguucscsa | 46 |
| F9 | AD-674303 | usgsaaggAfgGfCfAfaagauucguuL96 | 15 | asAfscgaAfuCfUfuugcCfuCfcuucascsg | 47 |
| F9 | AD-674305 | asasuauaUfaCfUfAfagguuucccuL96 | 16 | asGfsggaAfaCfCfuuagUfaUfauauuscsc | 48 |
| F9 | AD-674307 | ascsagacUfaGfUfCfuuucuaccuuL96 | 17 | asAfsgguAfgAfAfagacUfaGfucugusasa | 49 |
| F9 | AD-674310 | csasuaagGfcGfUfGfaugguucuuuL96 | 18 | asAfsagaAfcCfAfucacGfcCfuuaugsgsg | 50 |
| F9 | AD-674312 | ususuaugGfcCfAfGfaagaauacaaL96 | 19 | usUfsguaUfuCfUfucugGfcCfauaaasusg | 51 |
| F9 | AD-674314 | csuscuccGfuCfAfUfucucaccuuuL96 | 20 | asAfsaggUfgAfGfaaugAfcGfgagagsgsu | 52 |
| F9 | AD-674323 | uscsucauCfuGfAfGfacuuggugaaL96 | 21 | usUfscacCfaAfGfucucAfgAfugagasasa | 53 |
| F9 | AD-674325 | gsascucuGfcUfAfAfcguuccacuaL96 | 22 | usAfsgugGfaAfCfguuaGfcAfgagucsasg | 54 |
| F9 | AD-68435 | usgsugcaAfuGfAfAfaggcaaauauL96 | 23 | asUfsauuUfgCfCfuuucAfuUfgcacascsu | 55 |
| mTTR | AD- | csasguguUfcUfUfGfcucuauaaaaL96 | 24 | usUfsuuaUfagagcaaGfaAfcacugsusu | 56 |
| | 1181392 | | | | |
| mTTR | AD- | uscsuugcUfcUfAfUfaaaccguguuL96 | 25 | asAfscacGfguuuauaGfaGfcaagasasc | 57 |
| | 1181401 | | | | |
| | (Sequence | | | | |
| | 1) | | | | |
| mTTR | AD- | asgsuguuCfuUfGfCfucuauaaacaL96 | 26 | usGfsuuuAfuagagcaAfgAfacacusgsu | 58 |
| | 1181410 | | | | |
| | (Sequence | | | | |
| | 2) | | | | |
| mTTR | AD- | asgsaacuGfgAfCfAfccaaaucguaL96 | 27 | usAfscgaUfuugguguCfcAfguucusasc | 59 |
| | 1181417 | | | | |
| mTTR | AD- | ascsagugUfuCfUfUfgcucuauaaaL96 | 28 | usUfsuauAfgagcaagAfaCfacugususu | 60 |
| | 1181426 | | | | |
| | (Sequence | | | | |
| | 3) | | | | |
| mTTR | AD- | ususcuugCfuCfUfAfuaaaccguguL96 | 29 | asCfsacgGfuuuauagAfgCfaagaascsa | 61 |
| | 1181443 | | | | |
| mTTR | AD- | gsusguucUfuGfCfUfcuauaaaccaL96 | 30 | usGfsguuUfauagagcAfaGfaacacsusg | 62 |
| | 1181451 | | | | |
| | (Sequence | | | | |
| | 4) | | | | |
| mTTR | AD- | asascuggAfcAfCfCfaaaucguacuL96 | 31 | asGfsuacGfauuugguGfuCfcaguuscsu | 63 |
| | 1181460 | | | | |
| mTTR | AD | csasggagGfaCfCfAfggaucuugcaL96 | 32 | usGfscaaGfauccuggUfcCfuccugsgsg | 64 |
| | 1181469 | | | | |
| TTR | AD-157448 | csasauaaAfaCfAfUfuccugugaaaL96 | 33 | usUfsucacaggaaugUfuUfuauugsusc | 65 |
| TTR | AD-157464 | csusaaagCfaGfUfGfuuuucaccuaL96 | 34 | usAfsggugaaaacacUfgCfuuuagsusa | 66 |
| TTR | AD-157468 | csasgagaCfaAfUfAfaaacauuccuL96 | 35 | asGfsgaauguuuuauUfgUfcucugscsc | 67 |
| none | AD-64972 | uscscucuGfaUfGfGfucaaaguccuL96 | 36 | asGfsgacUfuugaccaUfcAfgaggascsa | 68 |

TABLE 2
Additional exemplary sequences of parent dsRNA molecules.

| | | | SEQ | | SEQ |
|---|---|---|---|---|---|
| Duplex | | | ID | | ID |
| ID | Target | Sense sequence (5′→3′) | NO: | Antisense sequence (5′→3′) | NO: |
| AD- | Marc1 | asasaaauGfuUfCfUfcaaaaaugaaL96 | 69 | usUfscauUfuUfUfgagaAfcAfuuuuusasa | 237 |
| 1531684 | | | | | |
| AD- | Marc1 | asasaaucAfcCfAfCfucuuugggcaL96 | 70 | usGfscccAfaAfGfagugGfuGfauuuuscsc | 238 |
| 1531719 | | | | | |
| AD- | Marc1 | asasagugGfgAfGfAfcccuguguaaL96 | 71 | usUfsacaCfaGfGfgucuCfcCfacuuusgsa | 239 |
| 1531682 | | | | | |
| AD-75247 | PNPLA3 | asasaugaAfaGfAfCfaaagguggauL96 | 72 | asUfsccaCfcUfUfugucUfuUfcauuuscsu | 240 |
| AD- | C3 | asasaugaGfgGfUfUfucacagucaaL96 | 73 | usUfsgacUfgUfGfaaacCfcUfcauuususc | 241 |
| 1531655 | | | | | |
| AD-67589 | PNPLA3 | asascuugCfuAfCfCfcauuaggauaL96 | 74 | usAfsuccUfaAfUfggguAfgCfaaguusgsc | 242 |
| AD- | Marc1 | asasucacCfaCfUfCfuuugggcaguL96 | 75 | asCfsugcCfcAfAfagagUfgGfugauususu | 243 |
| 1531703 | | | | | |
| AD- | C3 | ascsauggGfcCfAfGfuggaagaucaL96 | 76 | usGfsaucUfuCfCfacugGfcCfcaugususg | 244 |
| 1531665 | | | | | |
| AD- | C3 | ascscaggAfaCfUfGfaaccuugauaL96 | 77 | usAfsucaAfgGfUfucagUfuCfcuggusgsg | 245 |
| 1531660 | | | | | |
| AD- | C3 | ascscaggAfuGfCfCfacuaugucuaL96 | 78 | usAfsgacAfuAfGfuggcAfuCfcugguscsu | 246 |
| 1531672 | | | | | |
| AD- | PNPLA3 | ascscuaaCfuAfAfAfauaauguuuaL96 | 79 | usAfsaacAfuUfAfuuuuAfgUfuaggusgsa | 247 |
| 1010735 | | | | | |
| AD- | Marc1 | ascscucgCfcUfGfGfuccugauuuaL96 | 80 | usAfsaauCfaGfGfaccaGfgCfgaggususc | 248 |
| 1531721 | | | | | |
| AD-67605 | PNPLA3 | ascscuguUfgAfAfUfuuuguauuauL96 | 81 | asUfsaauAfcAfAfaauuCfaAfcaggusasa | 249 |
| AD- | C3 | ascsuacaUfgAfAfCfcuacagagauL96 | 82 | asUfscucUfgUfAfgguuCfaUfguagususg | 250 |
| 571552 | | | | | |
| AD- | Marc1 | ascsugauUfaUfGfGfaauaguucuuL96 | 83 | asAfsgaaCfuAfUfuccaUfaAfucagususa | 251 |
| 1531716 | | | | | |
| AD- | C3 | asgsaaauUfcUfAfCfuacaucuauuL96 | 84 | asAfsuagAfuGfUfaguaGfaAfuuucuscsu | 252 |
| 569269 | | | | | |
| AD- | Marc1 | asgsacagGfaUfUfCfugaaaacucaL96 | 85 | usGfsaguUfuUfCfagaaUfcCfugucususg | 253 |
| 1531718 | | | | | |
| AD- | C3 | asgsagcgGfgUfAfCfcucuucaucaL96 | 86 | usGfsaugAfaGfAfgguaCfcCfgcucusgsc | 254 |
| 1531663 | | | | | |
| AD- | SCN9A | asgscaaaGfgUfCfAfcaauuuccuaL96 | 87 | usAfsggaAfaUfUfgugaCfcUfuugcuscsa | 255 |
| 1531765 | | | | | |
| AD- | SCN9A | asgscauaAfaUfGfUfuuucgaaauaL96 | 88 | usAfsuuuCfgAfAfaacaUfuUfaugcususc | 256 |
| 1531735 | | | | | |
| AD- | PNPLA3 | asgscaugAfgGfUfUfcuuagaauguL96 | 89 | asCfsauuCfuAfAfgaacCfuCfaugcusgsg | 257 |
| 519933 | | | | | |
| AD- | PNPLA3 | asgsgaagCfaAfCfCfuuucgccuguL96 | 90 | asCfsaggCfgAfAfagguUfgCfuuccusasg | 258 |
| 519780 | | | | | |
| AD- | Marc1 | asgsgaccAfgAfUfUfgcuuacucaaL96 | 91 | usUfsgagUfaAfGfcaauCfuGfguccususg | 259 |
| 1531679 | | | | | |
| AD- | Marc1 | asgsgagaAfgAfAfAfagugauucaaL96 | 92 | usUfsgaaUfcAfCfuuuuCfuUfcuccuscsc | 260 |
| 1531692 | | | | | |
| AD- | SCN9A | asgsucuuCfaAfGfUfuggcaaaauaL96 | 93 | usAfsuuuUfgCfCfaacuUfgAfagacuscsg | 261 |
| 1531741 | | | | | |
| AD- | C3 | asgsuggaCfuAfUfGfuguacaagauL96 | 94 | asUfscuuGfuAfCfacauAfgUfccacuscsc | 262 |
| 572575 | | | | | |
| AD- | SCN9A | asgsuuccUfaUfCfUfccuuucagaaL96 | 95 | usUfscugAfaAfGfgagaUfaGfgaacusasc | 263 |
| 1531744 | | | | | |
| AD- | PNPLA3 | asusaaugUfcUfUfAfuguaaugcuuL96 | 96 | asAfsgcaUfuAfCfauaaGfaCfauuauscsc | 264 |
| 519354 | | | | | |
| AD-67551 | PNPLA3 | asusacauGfaGfCfAfagauuugcaaL96 | 97 | usUfsgcaAfaUfCfuugcUfcAfuguauscsc | 265 |
| AD- | Marc1 | asuscaacCfaGfGfAfgggaaacauaL96 | 98 | usAfsuguUfuCfCfcuccUfgGfuugauscsa | 266 |
| 1531687 | | | | | |
| AD- | SCN9A | asuscaucUfuUfGfGfgucauucuuuL96 | 99 | asAfsagaAfuGfAfcccaAfaGfaugausasa | 267 |
| 1531736 | | | | | |
| AD- | Marc1 | asuscugaUfgAfAfGfuauauuuuuuL96 | 100 | asAfsaaaAfuAfUfacuuCfaUfcagauscsu | 268 |
| 1531688 | | | | | |
| AD- | SCN9A | asuscuucUfuUfGfUfcguagugauuL96 | 101 | asAfsucaCfuAfCfgacaAfaGfaagauscsa | 269 |
| 1531747 | | | | | |
| AD- | SCN9A | asusgcugAfgAfAfAfuugucgaaaaL96 | 102 | usUfsuucGfaCfAfauuuCfuCfagcauscsu | 270 |
| 1531756 | | | | | |
| AD- | Marc1 | asusggcuUfgUfUfCfcagaugcauuL96 | 103 | asAfsugcAfuCfUfggaaCfaAfgccauscsa | 271 |
| 1531696 | | | | | |
| AD- | C3 | asusguacCfaUfGfCfuaaggccaaaL96 | 104 | usUfsuggCfcUfUfagcaUfgGfuacaususg | 272 |
| 1531658 | | | | | |
| AD- | SCN9A | asusgucgAfgUfAfCfacuuuuacuuL96 | 105 | asAfsguaAfaAfGfuguaCfuCfgacaususu | 273 |
| 1531757 | | | | | |
| AD-67565 | PNPLA3 | asusguuaGfuAfGfAfauaagccuuaL96 | 106 | usAfsaggCfuUfAfuucuAfcUfaacauscsu | 274 |
| AD- | PNPLA3 | asusuaggAfuAfAfUfgucuuauguaL96 | 107 | usAfscauAfaGfAfcauuAfuCfcuaausgsg | 275 |
| 1010714 | | | | | |
| AD- | SCN9A | asusucucUfuCfGfUfucacagaugaL96 | 108 | usCfsaucUfgUfGfaacgAfaGfagaauscsc | 276 |
| 1531728 | | | | | |
| AD- | Marc1 | csasacacUfuGfAfAfgcaugguguuL96 | 109 | asAfscacCfaUfGfcuucAfaGfuguugsusc | 277 |
| 1531686 | | | | | |
| AD-67583 | PNPLA3 | csasagauUfuGfCfAfacuugcuacaL96 | 110 | usGfsuagCfaAfGfuugcAfaAfucuugscsu | 278 |
| AD- | C3 | csasagguCfuAfCfGfccuauuacauL96 | 111 | asUfsguaAfuAfGfgcguAfgAfccuugsasc | 279 |
| 572388 | | | | | |
| AD- | C3 | csascccuCfaUfCfAfucuaccuggaL96 | 112 | usCfscagGfuAfGfaugaUfgAfgggugsusu | 280 |
| 1531662 | | | | | |
| AD- | C3 | csasccguAfuCfCfAfcugggaaucuL96 | 113 | asGfsauuCfcCfAfguggAfuAfcggugsgsg | 281 |
| 571901 | | | | | |
| AD- | PNPLA3 | csasccuuUfuUfCfAfccuaacuaaaL96 | 114 | usUfsuagUfuAfGfgugaAfaAfaggugsusu | 282 |
| 1010732 | | | | | |
| AD- | PNPLA3 | csasccuuUfuUfCfAfccuaacuaauL96 | 115 | asUfsuagUfuAfGfgugaAfaAfaggugsusu | 283 |
| 520061 | | | | | |
| AD- | SCN9A | csascuccUfuCfCfUfgauuguguuuL96 | 116 | asAfsacaCfaAfUfcaggAfaGfgagugsgsa | 284 |
| 1531770 | | | | | |
| AD- | Marc1 | csasgaacGfaAfAfGfuuauauggaaL96 | 117 | usUfsccaUfaUfAfacuuUfcGfuucugsasa | 285 |
| 1531705 | | | | | |
| AD- | C3 | csasgagaAfaUfUfCfuacuacaucuL96 | 118 | asGfsaugUfaGfUfagaaUfuUfcucugsusa | 286 |
| 569266 | | | | | |
| AD- | SCN9A | csasugaaCfgAfCfUfucuuccacuuL96 | 119 | asAfsgugGfaAfGfaaguCfgUfucaugsusg | 287 |
| 1531740 | | | | | |
| AD-75265 | PNPLA3 | csasugagCfaAfGfAfuuugcaacuuL96 | 120 | asAfsguuGfcAfAfaucuUfgCfucaugsusa | 288 |
| AD- | Marc1 | csasugguGfuUfUfCfagaacugagaL96 | 121 | usCfsucaGfuUfCfugaaAfcAfccaugscsu | 289 |
| 1531709 | | | | | |
| AD- | C3 | csasuugaGfaAfCfCfcggaaggcauL96 | 122 | asUfsgccUfuCfCfggguUfcUfcaaugsusu | 290 |
| 569048 | | | | | |
| AD- | C3 | cscsacagCfcAfAfAfgauaagaacuL96 | 123 | asGfsuucUfuAfUfcuuuGfgCfuguggsusc | 291 |
| 571633 | | | | | |
| AD- | C3 | cscsagauCfcAfCfUfucaccaagauL96 | 124 | asUfscuuGfgUfGfaaguGfgAfucuggsusa | 292 |
| 569516 | | | | | |
| AD- | PNPLA3 | cscsauuaGfgAfUfAfaugucuuauuL96 | 125 | asAfsuaaGfaCfAfuuauCfcUfaauggsgsu | 293 |
| 519346 | | | | | |
| AD- | C3 | cscscgucGfuGfCfGfuuggcucaauL96 | 126 | asUfsugaGfcCfAfacgcAfcGfacgggsasg | 294 |
| 571748 | | | | | |
| AD- | Marc1 | cscsgaccCfaAfGfGfaccagauuguL96 | 127 | asCfsaauCfuGfGfuccuUfgGfgucggsasa | 295 |
| 1531708 | | | | | |
| AD- | C3 | cscsgagcCfgUfUfCfucuacaauuuL96 | 128 | asAfsauuGfuAfGfagaaCfgGfcucggsasu | 296 |
| 570712 | | | | | |
| AD- | Marc1 | cscsguauGfuCfCfUfggaauauuauL96 | 129 | asUfsaauAfuUfCfcaggAfcAfuacggsusu | 297 |
| 1531706 | | | | | |
| AD-67584 | PNPLA3 | cscsuaacUfaAfAfAfuaauguuuaaL96 | 130 | usUfsaaaCfaUfUfauuuUfaGfuuaggsusg | 298 |
| AD- | C3 | cscsuuguCfuUfCfUfcagaaccagaL96 | 131 | usCfsuggUfuCfUfgagaAfgAfcaaggsasg | 299 |
| 1531668 | | | | | |
| AD-67577 | PNPLA3 | csgsacauCfuGfCfCfcuaaagucaaL96 | 132 | usUfsgacUfuUfAfgggcAfgAfugucgsusa | 300 |
| AD- | C3 | csgsugcgUfuGfGfCfucaaugaacuL96 | 133 | asGfsuucAfuUfGfagccAfaCfgcacgsasc | 301 |
| 571753 | | | | | |
| AD- | C3 | csusacccUfaCfUfCfuguuguucgaL96 | 134 | usCfsgaaCfaAfCfagagUfaGfgguagscsc | 302 |
| 1531657 | | | | | |
| AD- | C3 | csusacugCfaGfCfUfaaaagacuuuL96 | 135 | asAfsaguCfuUfUfuagcUfgCfaguagsgsg | 303 |
| 571715 | | | | | |
| AD- | C3 | csusagugCfuGfUfCfcagugagaaaL96 | 136 | usUfsucuCfaCfUfggacAfgCfacuagsusu | 304 |
| 1531659 | | | | | |
| AD-67560 | PNPLA3 | csusauuaAfuGfGfUfcagacuguuaL96 | 137 | usAfsacaGfuCfUfgaccAfuUfaauagsgsg | 305 |
| AD- | PNPLA3 | csusccauGfgCfGfGfggguaacaaaL96 | 138 | usUfsuguUfaCfCfcccgCfcAfuggagsasc | 306 |
| 1531674 | | | | | |
| AD- | PNPLA3 | csusgaguUfgGfUfUfuuaugaaaauL96 | 139 | asUfsuuuCfaUfAfaaacCfaAfcucagscsu | 307 |
| 519757 | | | | | |
| AD- | SCN9A | csusgcccAfaAfAfUfacugauaauaL96 | 140 | usAfsuuaUfcAfGfuauuUfuGfggcagscsa | 308 |
| 1531732 | | | | | |
| AD- | C3 | csusgggaGfgAfCfCfcugguaagcaL96 | 141 | usGfscuuAfcCfAfggguCfcUfcccagscsg | 309 |
| 1531656 | | | | | |
| AD- | Marc1 | csusguggAfgGfAfGfaagaaaaguaL96 | 142 | usAfscuuUfuCfUfucucCfuCfcacagsasa | 310 |
| 1531678 | | | | | |
| AD- | Marc1 | csusucuuAfuUfGfGfugacguggaaL96 | 143 | usUfsccaCfgUfCfaccaAfuAfagaagscsu | 311 |
| 1531701 | | | | | |
| AD- | Marc1 | csusuguuCfcAfGfAfugcauuuuaaL96 | 144 | usUfsaaaAfuGfCfaucuGfgAfacaagscsc | 312 |
| 1531680 | | | | | |
| AD- | SCN9A | csusuuguCfgUfAfGfugauuuuccuL96 | 145 | asGfsgaaAfaUfCfacuaCfgAfcaaagsasa | 313 |
| 1531734 | | | | | |
| AD- | C3 | gsascagaCfaAfGfAfccaucuacauL96 | 146 | asUfsguaGfaUfGfgucuUfgUfcugucsusg | 314 |
| 568977 | | | | | |
| AD- | C3 | gsasgaaaUfuCfUfAfcuacaucuauL96 | 147 | asUfsagaUfgUfAfguagAfaUfuucucsusg | 315 |
| 569268 | | | | | |
| AD- | C3 | gsasgaacCfaGfAfAfacaaugccauL96 | 148 | asUfsggcAfuUfGfuuucUfgGfuucucsusu | 316 |
| 572818 | | | | | |
| AD- | SCN9A | gsasggucAfaGfAfCfaucuuuaugaL96 | 149 | usCfsauaAfaGfAfugucUfuGfaccucscsa | 317 |
| 1531729 | | | | | |
| AD- | Marc1 | gsasgugcUfcCfUfUfcuccaguucuL96 | 150 | asGfsaacUfgGfAfgaagGfaGfcacucscsg | 318 |
| 1531689 | | | | | |
| AD-75275 | PNPLA3 | gsasuuugCfaAfCfUfugcuacccauL96 | 151 | asUfsgggUfaGfCfaaguUfgCfaaaucsusu | 319 |
| AD-67568 | PNPLA3 | gscsacagGfgAfAfCfcucuaccuuaL96 | 152 | usAfsaggUfaGfAfgguuCfcCfugugcsasg | 320 |
| AD- | C3 | gscsaggcAfgAfGfCfgcagcgggauL96 | 153 | asUfscccGfcUfGfcgcuCfuGfccugcsasc | 321 |
| 569494 | | | | | |
| AD- | Marc1 | gscscauuCfcCfCfUfcagcuaaugaL96 | 154 | usCfsauuAfgCfUfgaggGfgAfauggcsasa | 322 |
| 1531722 | | | | | |
| AD- | C3 | gscscucuUfcUfUfAfacaaauuucuL96 | 155 | asGfsaaaUfuUfGfuuaaGfaAfgaggcscsc | 323 |
| 571610 | | | | | |
| AD- | SCN9A | gscsguugUfaGfUfUfccuaucuccuL96 | 156 | asGfsgagAfuAfGfgaacUfaCfaacgcscsu | 324 |
| 1531753 | | | | | |
| AD- | SCN9A | gscsucauCfaUfGfUfgcacuauucuL96 | 157 | asGfsaauAfgUfGfcacaUfgAfugagcsasu | 325 |
| 1531759 | | | | | |
| AD- | C3 | gscsugagGfaGfAfAfuugcuucauuL96 | 158 | asAfsugaAfgCfAfauucUfcCfucagcsasc | 326 |
| 572495 | | | | | |
| AD- | PNPLA3 | gscsugagUfuGfGfUfuuuaugaaaaL96 | 159 | usUfsuucAfuAfAfaaccAfaCfucagcsusc | 327 |
| 1010719 | | | | | |
| AD- | Marc1 | gscsuucuCfaGfAfCfagcauuggauL96 | 160 | asUfsccaAfuGfCfugucUfgAfgaagcsasg | 328 |
| 1531683 | | | | | |
| AD- | Marc1 | gsgsaccaGfaUfUfGfcuuacucagaL96 | 161 | usCfsugaGfuAfAfgcaaUfcUfgguccsusu | 329 |
| 1531711 | | | | | |
| AD- | C3 | gsgsagguUfgUfGfCfugagccggaaL96 | 162 | usUfsccgGfcUfCfagcaCfaAfccuccscsc | 330 |
| 1531664 | | | | | |
| AD- | SCN9A | gsgscacaUfgAfAfCfgacuucuucaL96 | 163 | usGfsaagAfaGfUfcguuCfaUfgugccsasc | 331 |
| 1531762 | | | | | |
| AD-67526 | PNPLA3 | gsgsccuuAfuCfCfCfuccuuccuuaL96 | 164 | usAfsaggAfaGfGfagggAfuAfaggccsasc | 332 |
| AD- | SCN9A | gsgscuggAfuUfUfCfcuaauuguuuL96 | 165 | asAfsacaAfuUfAfggaaAfuCfcagccsasa | 333 |
| 1531725 | | | | | |
| AD- | SCN9A | gsgsgaaaAfcAfAfUfcuuccguuuaL96 | 166 | usAfsaacGfgAfAfgauuGfuUfuucccsusu | 334 |
| 1531737 | | | | | |
| AD- | PNPLA3 | gsgsgguaAfcAfAfGfaugauaaucuL96 | 167 | asGfsauuAfuCfAfucuuGfuUfaccccscsg | 335 |
| 1531673 | | | | | |
| AD- | Marc1 | gsgsugucUfcAfAfUfgcuucaauguL96 | 168 | asCfsauuGfaAfGfcauuGfaGfacaccsasg | 336 |
| 1531717 | | | | | |
| AD- | C3 | gsusaaugCfaGfGfAfcuucuucauuL96 | 169 | asAfsugaAfgAfAfguccUfgCfauuacsusg | 337 |
| 570644 | | | | | |
| AD- | C3 | gsusaccuCfuUfCfAfuccagacaguL96 | 170 | asCfsuguCfuGfGfaugaAfgAfgguacscsc | 338 |
| 568962 | | | | | |
| AD- | Marc1 | gsusauaaCfuCfUfAfagaucugauuL96 | 171 | asAfsucaGfaUfCfuuagAfgUfuauacsasa | 339 |
| 1531690 | | | | | |
| AD- | SCN9A | gsusccucUfaAfGfAfagaauaucuaL96 | 172 | usAfsgauAfuUfCfuucuUfaGfaggacsusg | 340 |
| 1531750 | | | | | |
| AD- | Marc1 | gsusgaccCfuUfCfAfgaacgaaaguL96 | 173 | asCfsuuuCfgUfUfcugaAfgGfgucacsasc | 341 |
| 1531710 | | | | | |
| AD-67578 | PNPLA3 | gsusgaguGfaCfAfAfcguacccuuaL96 | 174 | usAfsaggGfuAfCfguugUfcAfcucacsusc | 342 |
| AD-67582 | PNPLA3 | gsusgcuaAfaGfUfUfucccaucuuuL96 | 175 | asAfsagaUfgGfGfaaacUfuUfagcacscsu | 343 |
| AD- | C3 | gsusgggaGfaAfGfUfucggccuagaL96 | 176 | usCfsuagGfcCfGfaacuUfcUfcccacsusg | 344 |
| 1531666 | | | | | |
| AD- | Marc1 | usasacucUfaAfGfAfucugaugaauL96 | 177 | asUfsucaUfcAfGfaucuUfaGfaguuasusa | 345 |
| 1531695 | | | | | |
| AD- | SCN9A | usascaugAfuCfUfUfcuuugucguaL96 | 178 | usAfscgaCfaAfAfgaagAfuCfauguasgsg | 346 |
| 1531723 | | | | | |
| AD-75270 | PNPLA3 | usasccugUfuGfAfAfuuuuguauuaL96 | 179 | usAfsauaCfaAfAfauucAfaCfagguasasc | 347 |
| AD- | C3 | usascgugCfuGfCfCfcaguuucgaaL96 | 180 | usUfscgaAfaCfUfgggcAfgCfacguascsu | 348 |
| 1531671 | | | | | |
| AD- | PNPLA3 | usasggauAfaUfGfUfcuuauguaauL96 | 181 | asUfsuacAfuAfAfgacaUfuAfuccuasasu | 349 |
| 519350 | | | | | |
| AD- | SCN9A | usasugccAfaAfAfUfccuuuuuauaL96 | 182 | usAfsuaaAfaAfGfgauuUfuGfgcauasgsa | 350 |
| 1531764 | | | | | |
| AD- | SCN9A | usasugugAfaAfCfAfaaccuuacgaL96 | 183 | usCfsguaAfgGfUfuuguUfuCfacauasasu | 351 |
| 1531739 | | | | | |
| AD- | Marc1 | usasuuguAfaUfUfUfcaggaugcgaL96 | 184 | usCfsgcaUfcCfUfgaaaUfuAfcaauasusu | 352 |
| 1531681 | | | | | |
| AD- | Marc1 | uscsaaugCfuUfCfAfaugucccaguL96 | 185 | asCfsuggGfaCfAfuugaAfgCfauugasgsa | 353 |
| 1531704 | | | | | |
| AD-67564 | PNPLA3 | uscsacuuGfaGfGfAfggcgagucuaL96 | 186 | usAfsgacUfcGfCfcuccUfcAfagugascsu | 354 |
| AD- | Marc1 | uscsagaaCfgAfAfAfguuauauggaL96 | 187 | usCfscauAfuAfAfcuuuCfgUfucugasasg | 355 |
| 1531676 | | | | | |
| AD- | Marc1 | uscsaggaUfgCfGfAfugucuaugcaL96 | 188 | usGfscauAfgAfCfaucgCfaUfccugasasa | 356 |
| 1531700 | | | | | |
| AD- | Marc1 | uscscauaGfaUfCfUfggaucuggcaL96 | 189 | usGfsccaGfaUfCfcagaUfcUfauggasasa | 357 |
| 1531702 | | | | | |
| AD- | SCN9A | uscscauuGfuCfUfUfgacaucuuauL96 | 190 | asUfsaagAfuGfUfcaagAfcAfauggasusc | 358 |
| 1531730 | | | | | |
| AD- | SCN9A | uscscucuAfaGfAfAfgaauaucuauL96 | 191 | asUfsagaUfaUfUfcuucUfuAfgaggascsu | 359 |
| 1531738 | | | | | |
| AD- | SCN9A | uscscugcAfaGfUfCfaaguuccaaaL96 | 192 | usUfsuggAfaCfUfugacUfuGfcaggasasa | 360 |
| 1531733 | | | | | |
| AD-67554 | PNPLA3 | uscsugagCfuGfAfGfuugguuuuauL96 | 193 | asUfsaaaAfcCfAfacucAfgCfucagasgsg | 361 |
| AD- | Marc1 | usgsacccUfuCfAfGfaacgaaaguuL96 | 194 | asAfscuuUfcGfUfucugAfaGfggucascsa | 362 |
| 1531685 | | | | | |
| AD-75269 | PNPLA3 | usgsagugAfaGfAfAfaugaaagacaL96 | 195 | usGfsucuUfuCfAfuuucUfuCfacucasgsu | 363 |
| AD- | SCN9A | usgsauagUfuAfCfCfuaguuugcaaL96 | 196 | usUfsgcaAfaCfUfagguAfaCfuaucasasa | 364 |
| 1531752 | | | | | |
| AD- | SCN9A | usgscagaCfaAfGfAfucuucacuuaL96 | 197 | usAfsaguGfaAfGfaucuUfgUfcugcasusa | 365 |
| 1531754 | | | | | |
| AD- | PNPLA3 | usgsccaaAfaCfAfAfccaucaccguL96 | 198 | asCfsgguGfaUfGfguugUfuUfuggcasusc | 366 |
| 518942 | | | | | |
| AD- | C3 | usgscgauCfaGfAfAfgagaccaaguL96 | 199 | asCfsuugGfuCfUfcuucUfgAfucgcasgsg | 367 |
| 571932 | | | | | |
| AD- | C3 | usgscuaaGfgCfCfAfaagaucaacuL96 | 200 | asGfsuugAfuCfUfuuggCfcUfuagcasusg | 368 |
| 572022 | | | | | |
| AD- | SCN9A | usgscucuCfcAfUfAfuuggauaaaaL96 | 201 | usUfsuuaUfcCfAfauauGfgAfgagcasasu | 369 |
| 1531760 | | | | | |
| AD- | SCN9A | usgscucuCfcUfUfUfgugguuucauL96 | 202 | asUfsgaaAfcCfAfcaaaGfgAfgagcasusc | 370 |
| 1531766 | | | | | |
| AD- | C3 | usgsgacuAfuGfUfGfuacaagaccuL96 | 203 | asGfsgucUfuGfUfacacAfuAfguccascsu | 371 |
| 572577 | | | | | |
| AD- | Marc1 | usgsgaggAfgAfAfGfaaaagugauuL96 | 204 | asAfsucaCfuUfUfucuuCfuCfcuccascsa | 372 |
| 1531697 | | | | | |
| AD-67561 | PNPLA3 | usgsgauaCfaUfGfAfgcaagauuuaL96 | 205 | usAfsaauCfuUfGfcucaUfgUfauccascsc | 373 |
| AD-67586 | PNPLA3 | usgsggagAfgAfUfAfugccuucgaaL96 | 206 | usUfscgaAfgGfCfauauCfuCfucccasgsc | 374 |
| AD- | C3 | usgsggcaAfcUfCfCfaacaauuacuL96 | 207 | asGfsuaaUfuGfUfuggaGfuUfgcccascsg | 375 |
| 569763 | | | | | |
| AD- | SCN9A | usgsggucAfuUfCfUfucacuuugaaL96 | 208 | usUfscaaAfgUfGfaagaAfuGfacccasasa | 376 |
| 1531726 | | | | | |
| AD- | SCN9A | usgsgucuUfuAfCfUfggaaucuuuuL96 | 209 | asAfsaagAfuUfCfcaguAfaAfgaccasasa | 377 |
| 1531742 | | | | | |
| AD-67573 | PNPLA3 | usgsgugaCfaUfGfGfcuuccagauaL96 | 210 | usAfsucuGfgAfAfgccaUfgUfcaccasgsu | 378 |
| AD- | SCN9A | usgsguguCfaUfCfAfuagauaauuuL96 | 211 | asAfsauuAfuCfUfaugaUfgAfcaccasasu | 379 |
| 1531761 | | | | | |
| AD- | Marc1 | usgsguguCfuCfAfAfugcuucaauaL96 | 212 | usAfsuugAfaGfCfauugAfgAfcaccasgsa | 380 |
| 1531712 | | | | | |
| AD- | C3 | usgsuacaAfgAfCfCfcgacuggucaL96 | 213 | usGfsaccAfgUfCfggguCfuUfguacascsa | 381 |
| 1531669 | | | | | |
| AD- | SCN9A | usgsuaggAfgAfAfUfucacuuuucaL96 | 214 | usGfsaaaAfgUfGfaauuCfuCfcuacascsa | 382 |
| 1531745 | | | | | |
| AD- | SCN9A | usgsuaggAfgAfAfUfucacuuuucuL96 | 215 | asGfsaaaAfgUfGfaauuCfuCfcuacascsa | 383 |
| 1531724 | | | | | |
| AD- | SCN9A | usgsucgaGfuAfCfAfcuuuuacugaL96 | 216 | usCfsaguAfaAfAfguguAfcUfcgacasusu | 384 |
| 1531731 | | | | | |
| AD- | C3 | usgsuucgUfgCfUfGfaauaagaaguL96 | 217 | asCfsuucUfuAfUfucagCfaCfgaacascsg | 385 |
| 570132 | | | | | |
| AD- | SCN9A | usgsuucuGfuCfUfGfaguguguuuaL96 | 218 | usAfsaacAfcAfCfucagAfcAfgaacascsa | 386 |
| 1531769 | | | | | |
| AD- | Marc1 | usgsuuuaAfaAfCfCfcaauaucuauL96 | 219 | asUfsagaUfaUfUfggguUfuUfaaacasasc | 387 |
| 1531694 | | | | | |
| AD- | Marc1 | ususaaaaCfuGfUfGfaauaaauggaL96 | 220 | usCfscauUfuAfUfucacAfgUfuuuaasasa | 388 |
| 1531677 | | | | | |
| AD- | SCN9A | ususaccuAfuCfUfCfugcuucaaguL96 | 221 | asCfsuugAfaGfCfagagAfuAfgguaascsc | 389 |
| 1531727 | | | | | |
| AD-67575 | PNPLA3 | ususaccuGfuUfGfAfauuuuguauuL96 | 222 | asAfsuacAfaAfAfuucaAfcAfgguaascsa | 390 |
| AD-75274 | PNPLA3 | ususauguAfaUfGfCfugcccuguaaL96 | 223 | usUfsacaGfgGfCfagcaUfuAfcauaasgsa | 391 |
| AD- | SCN9A | ususccucAfaGfGfAfaaaagauaaaL96 | 224 | usUfsuauCfuUfUfuuccUfuGfaggaasasu | 392 |
| 1531768 | | | | | |
| AD- | C3 | ususcgugCfuGfAfAfuaagaagaauL96 | 225 | asUfsucuUfcUfUfauucAfgCfacgaascsa | 393 |
| 570134 | | | | | |
| AD- | Marc1 | ususgccaUfuUfUfGfuccuuugauuL96 | 226 | asAfsucaAfaGfGfacaaAfaUfggcaasusa | 394 |
| 1531707 | | | | | |
| AD-75272 | PNPLA3 | ususgcuaCfcCfAfUfuaggauaauaL96 | 227 | usAfsuuaUfcCfUfaaugGfgUfagcaasgsu | 395 |
| AD-67567 | PNPLA3 | ususgguuUfuAfUfGfaaaagcuagaL96 | 228 | usCfsuagCfuUfUfucauAfaAfaccaascsu | 396 |
| AD- | Marc1 | ususguaaUfuUfCfAfggaugcgauaL96 | 229 | usAfsucgCfaUfCfcugaAfaUfuacaasusa | 397 |
| 1531714 | | | | | |
| AD- | Marc1 | ususguucCfaGfAfUfgcauuuuaauL96 | 230 | asUfsuaaAfaUfGfcaucUfgGfaacaasgsc | 398 |
| 1531720 | | | | | |
| AD- | SCN9A | ususuaguAfcAfCfUfccuuauucauL96 | 231 | asUfsgaaUfaAfGfgaguGfuAfcuaaasasu | 399 |
| 1531746 | | | | | |
| AD- | SCN9A | ususuaucAfuCfUfUfugggucauuaL96 | 232 | usAfsaugAfcCfCfaaagAfuGfauaaasgsa | 400 |
| 1531755 | | | | | |
| AD- | Marc1 | ususuccaUfaGfAfUfcuggaucugaL96 | 233 | usCfsagaUfcCfAfgaucUfaUfggaaasasu | 401 |
| 1531675 | | | | | |
| AD- | SCN9A | ususuguaGfaUfCfUfugcaauuacaL96 | 234 | usGfsuaaUfuGfCfaagaUfcUfacaaasasg | 402 |
| 1531767 | | | | | |
| AD- | PNPLA3 | ususuuagAfaCfAfCfcuuuuucacuL96 | 235 | asGfsugaAfaAfAfggugUfuCfuaaaasusu | 403 |
| 520053 | | | | | |
| AD- | PNPLA3 | ususuuucAfcCfUfAfacuaaaauaaL96 | 236 | usUfsauuUfuAfGfuuagGfuGfaaaaasgsg | 404 |
| 1010734 | | | | | |

TABLE 3
More additional exemplary sequences of parent dsRNA molecules.

| | | | SEQ | | SEQ |
|---|---|---|---|---|---|
| Duplex | | | ID | | ID |
| ID | Target | Sense sequence (5′→3′) | NO: | Antisense sequence (5′→3′) | NO: |
| AD- | AGT | asgsccugAfgGfGfCfcaccauccuuL96 | 405 | asAfsggaUfgGfUfggccCfuCfaggcuscsa | 752 |
| 1632799 | | | | | |
| AD- | AGT | cscsugagGfgCfCfAfccauccucuuL96 | 406 | asAfsgagGfaUfGfguggCfcCfucaggscsu | 753 |
| 1632801 | | | | | |
| AD- | AGT | asgsggccAfcCfAfUfccucugccuuL96 | 407 | asAfsggcAfgAfGfgaugGfuGfgcccuscsa | 754 |
| 1632805 | | | | | |
| AD- | AGT | gsusgaccGfgGfUfGfuacauacacuL96 | 408 | asGfsuguAfuGfUfacacCfcGfgucacscsu | 755 |
| 1632838 | | | | | |
| AD- | AGT | cscsggguGfuAfCfAfuacaccccuuL96 | 409 | asAfsgggGfuGfUfauguAfcAfcccggsusc | 756 |
| 1684490 | | | | | |
| AD- | AGT | csgsggugUfaCfAfUfacaccccuuuL96 | 410 | asAfsaggGfgUfGfuaugUfaCfacccgsgsu | 757 |
| 1684492 | | | | | |
| AD- | AGT | gsgsguguAfcAfUfAfcaccccuucuL96 | 411 | asGfsaagGfgGfUfguauGfuAfcacccsgsg | 758 |
| 1684494 | | | | | |
| AD- | AGT | gsgsuguaCfaUfAfCfaccccuuccuL96 | 412 | asGfsgaaGfgGfGfuguaUfgUfacaccscsg | 759 |
| 1684496 | | | | | |
| AD- | AGT | gsusguacAfuAfCfAfccccuuccauL96 | 413 | asUfsggaAfgGfGfguguAfuGfuacacscsc | 760 |
| 1684498 | | | | | |
| AD- | AGT | usgsuacaUfaCfAfCfcccuuccacuL96 | 414 | asGfsuggAfaGfGfggugUfaUfguacascsc | 761 |
| 1684500 | | | | | |
| AD- | AGT | gsusacauAfcAfCfCfccuuccaccuL96 | 415 | asGfsgugGfaAfGfggguGfuAfuguacsasc | 762 |
| 1684502 | | | | | |
| AD- | AGT | usascauaCfaCfCfCfcuuccaccuuL96 | 416 | asAfsgguGfgAfAfggggUfgUfauguascsa | 763 |
| 1684504 | | | | | |
| AD- | AGT | ascsauacAfcCfCfCfuuccaccucuL96 | 417 | asGfsaggUfgGfAfagggGfuGfuaugusasc | 764 |
| 1684506 | | | | | |
| AD- | AGT | csasuacaCfcCfCfUfuccaccucguL96 | 418 | asCfsgagGfuGfGfaaggGfgUfguaugsusa | 765 |
| 1684508 | | | | | |
| AD- | AGT | asusacacCfcCfUfUfccaccucguuL96 | 419 | asAfscgaGfgUfGfgaagGfgGfuguausgsu | 766 |
| 1684510 | | | | | |
| AD- | AGT | cscscuucCfaCfCfUfcgucauccauL96 | 420 | asUfsggaUfgAfCfgaggUfgGfaagggsgsu | 767 |
| 1684512 | | | | | |
| AD- | AGT | cscsuuccAfcCfUfCfgucauccacuL96 | 421 | asGfsuggAfuGfAfcgagGfuGfgaaggsgsg | 768 |
| 1684514 | | | | | |
| AD- | AGT | csusuccaCfcUfCfGfucauccacauL96 | 422 | asUfsgugGfaUfGfacgaGfgUfggaagsgsg | 769 |
| 1632840 | | | | | |
| AD- | AGT | ususccacCfuCfGfUfcauccacaauL96 | 423 | asUfsuguGfgAfUfgacgAfgGfuggaasgsg | 770 |
| 1632841 | | | | | |
| AD- | AGT | uscscaccUfcGfUfCfauccacaauuL96 | 424 | asAfsuugUfgGfAfugacGfaGfguggasasg | 771 |
| 1632842 | | | | | |
| AD- | AGT | cscsaccuCfgUfCfAfuccacaauguL96 | 425 | asCfsauuGfuGfGfaugaCfgAfgguggsasa | 772 |
| 1632843 | | | | | |
| AD- | AGT | csasccucGfuCfAfUfccacaaugauL96 | 426 | asUfscauUfgUfGfgaugAfcGfaggugsgsa | 773 |
| 1632844 | | | | | |
| AD- | AGT | cscsucguCfaUfCfCfacaaugagauL96 | 427 | asUfscucAfuUfGfuggaUfgAfcgaggsusg | 774 |
| 1632846 | | | | | |
| AD- | AGT | csuscgucAfuCfCfAfcaaugagaguL96 | 428 | asCfsucuCfaUfUfguggAfuGfacgagsgsu | 775 |
| 1632847 | | | | | |
| AD- | AGT | uscsgucaUfcCfAfCfaaugagaguuL96 | 429 | asAfscucUfcAfUfugugGfaUfgacgasgsg | 776 |
| 1632848 | | | | | |
| AD- | AGT | csgsucauCfcAfCfAfaugagaguauL96 | 430 | asUfsacuCfuCfAfuuguGfgAfugacgsasg | 777 |
| 1632849 | | | | | |
| AD- | AGT | gsuscaucCfaCfAfAfugagaguacuL96 | 431 | asGfsuacUfcUfCfauugUfgGfaugacsgsa | 778 |
| 1632836 | | | | | |
| AD- | AGT | uscsauccAfcAfAfUfgagaguaccuL96 | 432 | asGfsguaCfuCfUfcauuGfuGfgaugascsg | 779 |
| 1632850 | | | | | |
| AD- | AGT | csasuccaCfaAfUfGfagaguaccuuL96 | 433 | asAfsgguAfcUfCfucauUfgUfggaugsasc | 780 |
| 1632851 | | | | | |
| AD- | AGT | asusccacAfaUfGfAfgaguaccuguL96 | 434 | asCfsaggUfaCfUfcucaUfuGfuggausgsa | 781 |
| 1632852 | | | | | |
| AD- | AGT | uscscacaAfuGfAfGfaguaccuguuL96 | 435 | asAfscagGfuAfCfucucAfuUfguggasusg | 782 |
| 1632853 | | | | | |
| AD- | AGT | cscsacaaUfgAfGfAfguaccuguguL96 | 436 | asCfsacaGfgUfAfcucuCfaUfuguggsasu | 783 |
| 1632854 | | | | | |
| AD- | AGT | csascaauGfaGfAfGfuaccugugauL96 | 437 | asUfscacAfgGfUfacucUfcAfuugugsgsa | 784 |
| 1632855 | | | | | |
| AD- | AGT | ascsaaugAfgAfGfUfaccugugaguL96 | 438 | asCfsucaCfaGfGfuacuCfuCfauugusgsg | 785 |
| 1632856 | | | | | |
| AD- | AGT | csasaugaGfaGfUfAfccugugagcuL96 | 439 | asGfscucAfcAfGfguacUfcUfcauugsusg | 786 |
| 1632857 | | | | | |
| AD- | AGT | asasugagAfgUfAfCfcugugagcauL96 | 440 | asUfsgcuCfaCfAfgguaCfuCfucauusgsu | 787 |
| 1632858 | | | | | |
| AD- | AGT | asusgagaGfuAfCfCfugugagcaguL96 | 441 | asCfsugcUfcAfCfagguAfcUfcucaususg | 788 |
| 1632859 | | | | | |
| AD- | AGT | usgsagagUfaCfCfUfgugagcagcuL96 | 442 | asGfscugCfuCfAfcaggUfaCfucucasusu | 789 |
| 1632860 | | | | | |
| AD- | AGT | gsasgaguAfcCfUfGfugagcagcuuL96 | 443 | asAfsgcuGfcUfCfacagGfuAfcucucsasu | 790 |
| 1632861 | | | | | |
| AD- | AGT | asgsaguaCfcUfGfUfgagcagcuguL96 | 444 | asCfsagcUfgCfUfcacaGfgUfacucuscsa | 791 |
| 1632862 | | | | | |
| AD- | AGT | gsasguacCfuGfUfGfagcagcugguL96 | 445 | asCfscagCfuGfCfucacAfgGfuacucsusc | 792 |
| 1632863 | | | | | |
| AD- | AGT | asgsuaccUfgUfGfAfgcagcuggcuL96 | 446 | asGfsccaGfcUfGfcucaCfaGfguacuscsu | 793 |
| 1632864 | | | | | |
| AD- | AGT | gsusaccuGfuGfAfGfcagcuggcauL96 | 447 | asUfsgccAfgCfUfgcucAfcAfgguacsusc | 794 |
| 1632865 | | | | | |
| AD- | AGT | usasccugUfgAfGfCfagcuggcaauL96 | 448 | asUfsugcCfaGfCfugcuCfaCfagguascsu | 795 |
| 1632866 | | | | | |
| AD- | AGT | asasugguCfgGfGfAfugcuggccauL96 | 449 | asUfsggcCfaGfCfauccCfgAfccauusgsc | 796 |
| 1632991 | | | | | |
| AD- | AGT | asusggucGfgGfAfUfgcuggccaauL96 | 450 | asUfsuggCfcAfGfcaucCfcGfaccaususg | 797 |
| 1632992 | | | | | |
| AD- | AGT | usgsgucgGfgAfUfGfcuggccaacuL96 | 451 | asGfsuugGfcCfAfgcauCfcCfgaccasusu | 798 |
| 1632993 | | | | | |
| AD- | AGT | gsgsucggGfaUfGfCfuggccaacuuL96 | 452 | asAfsguuGfgCfCfagcaUfcCfcgaccsasu | 799 |
| 1632994 | | | | | |
| AD- | AGT | gsuscgggAfuGfCfUfggccaacuuuL96 | 453 | asAfsaguUfgGfCfcagcAfuCfccgacscsa | 800 |
| 1632995 | | | | | |
| AD- | AGT | uscsgggaUfgCfUfGfgccaacuucuL96 | 454 | asGfsaagUfuGfGfccagCfaUfcccgascsc | 801 |
| 1632996 | | | | | |
| AD- | AGT | csgsggauGfcUfGfGfccaacuucuuL96 | 455 | asAfsgaaGfuUfGfgccaGfcAfucccgsasc | 802 |
| 1632997 | | | | | |
| AD- | AGT | gsgsgaugCfuGfGfCfcaacuucuuuL96 | 456 | asAfsagaAfgUfUfggccAfgCfaucccsgsa | 803 |
| 1632998 | | | | | |
| AD- | AGT | gsgsaugcUfgGfCfCfaacuucuuguL96 | 457 | asCfsaagAfaGfUfuggcCfaGfcauccscsg | 804 |
| 1632999 | | | | | |
| AD- | AGT | gsasugcuGfgCfCfAfacuucuugguL96 | 458 | asCfscaaGfaAfGfuuggCfcAfgcaucscsc | 805 |
| 1633000 | | | | | |
| AD- | AGT | gscsuggcCfaAfCfUfucuugggcuuL96 | 459 | asAfsgccCfaAfGfaaguUfgGfccagcsasu | 806 |
| 1633003 | | | | | |
| AD- | AGT | csusggccAfaCfUfUfcuugggcuuuL96 | 460 | asAfsagcCfcAfAfgaagUfuGfgccagscsa | 807 |
| 1633004 | | | | | |
| AD- | AGT | gscscaacUfuCfUfUfgggcuuccguL96 | 461 | asCfsggaAfgCfCfcaagAfaGfuuggcscsa | 808 |
| 1633007 | | | | | |
| AD- | AGT | cscsaacuUfcUfUfGfggcuuccguuL96 | 462 | asAfscggAfaGfCfccaaGfaAfguuggscsc | 809 |
| 1633008 | | | | | |
| AD- | AGT | csasacuuCfuUfGfGfgcuuccguauL96 | 463 | asUfsacgGfaAfGfcccaAfgAfaguugsgsc | 810 |
| 1633009 | | | | | |
| AD- | AGT | asascuucUfuGfGfGfcuuccguauuL96 | 464 | asAfsuacGfgAfAfgcccAfaGfaaguusgsg | 811 |
| 1633010 | | | | | |
| AD- | AGT | ascsuucuUfgGfGfCfuuccguauauL96 | 465 | asUfsauaCfgGfAfagccCfaAfgaagususg | 812 |
| 1633011 | | | | | |
| AD- | AGT | csusucuuGfgGfCfUfuccguauauuL96 | 466 | asAfsuauAfcGfGfaagcCfcAfagaagsusu | 813 |
| 1633012 | | | | | |
| AD- | AGT | ususcuugGfgCfUfUfccguauauauL96 | 467 | asUfsauaUfaCfGfgaagCfcCfaagaasgsu | 814 |
| 1633013 | | | | | |
| AD- | AGT | uscsuuggGfcUfUfCfcguauauauuL96 | 468 | asAfsuauAfuAfCfggaaGfcCfcaagasasg | 815 |
| 1633014 | | | | | |
| AD- | AGT | csusugggCfuUfCfCfguauauauguL96 | 469 | asCfsauaUfaUfAfcggaAfgCfccaagsasa | 816 |
| 1633015 | | | | | |
| AD- | AGT | ususgggcUfuCfCfGfuauauaugguL96 | 470 | asCfscauAfuAfUfacggAfaGfcccaasgsa | 817 |
| 1633016 | | | | | |
| AD- | AGT | gsgsgcuuCfcGfUfAfuauauggcauL96 | 471 | asUfsgccAfuAfUfauacGfgAfagcccsasa | 818 |
| 1633018 | | | | | |
| AD- | AGT | gsgscuucCfgUfAfUfauauggcauuL96 | 472 | asAfsugcCfaUfAfuauaCfgGfaagccscsa | 819 |
| 1633019 | | | | | |
| AD- | AGT | gscsuuccGfuAfUfAfuauggcauguL96 | 473 | asCfsaugCfcAfUfauauAfcGfgaagcscsc | 820 |
| 1633020 | | | | | |
| AD- | AGT | usasuauaUfgGfCfAfugcacaguguL96 | 474 | asCfsacuGfuGfCfaugcCfaUfauauascsg | 821 |
| 1633027 | | | | | |
| AD- | AGT | asusauauGfgCfAfUfgcacagugauL96 | 475 | asUfscacUfgUfGfcaugCfcAfuauausasc | 822 |
| 1633028 | | | | | |
| AD- | AGT | usasuaugGfcAfUfGfcacagugaguL96 | 476 | asCfsucaCfuGfUfgcauGfcCfauauasusa | 823 |
| 1633029 | | | | | |
| AD- | AGT | asusauggCfaUfGfCfacagugagcuL96 | 477 | asGfscucAfcUfGfugcaUfgCfcauausasu | 824 |
| 1633030 | | | | | |
| AD- | AGT | usasuggcAfuGfCfAfcagugagcuuL96 | 478 | asAfsgcuCfaCfUfgugcAfuGfccauasusa | 825 |
| 1633031 | | | | | |
| AD-84731 | AGT | asusggcaUfgCfAfCfagugagcuauL96 | 479 | asUfsagcUfcAfCfugugCfaUfgccausasu | 826 |
| AD- | AGT | usgsgcauGfcAfCfAfgugagcuauuL96 | 480 | asAfsuagCfuCfAfcuguGfcAfugccasusa | 827 |
| 1633032 | | | | | |
| AD- | AGT | gsgscaugCfaCfAfGfugagcuauguL96 | 481 | asCfsauaGfcUfCfacugUfgCfaugccsasu | 828 |
| 1633033 | | | | | |
| AD- | AGT | gscsaugcAfcAfGfUfgagcuaugguL96 | 482 | asCfscauAfgCfUfcacuGfuGfcaugcscsa | 829 |
| 1633034 | | | | | |
| AD- | AGT | csasugcaCfaGfUfGfagcuauggguL96 | 483 | asCfsccaUfaGfCfucacUfgUfgcaugscsc | 830 |
| 1684516 | | | | | |
| AD- | AGT | asusgcacAfgUfGfAfgcuaugggguL96 | 484 | asCfscccAfuAfGfcucaCfuGfugcausgsc | 831 |
| 1684518 | | | | | |
| AD- | AGT | cscsucucCfcCfAfAfcggcugucuuL96 | 485 | asAfsgacAfgCfCfguugGfgGfagaggsasc | 832 |
| 1684520 | | | | | |
| AD- | AGT | usgsgcacCfcUfGfGfccucucucuuL96 | 486 | asAfsgagAfgAfGfgccaGfgGfugccasasa | 833 |
| 1633048 | | | | | |
| AD- | AGT | gsgscaccCfuGfGfCfcucucucuauL96 | 487 | asUfsagaGfaGfAfggccAfgGfgugccsasa | 834 |
| 1633049 | | | | | |
| AD- | AGT | gsascaggCfuAfCfAfggcaauccuuL96 | 488 | asAfsggaUfuGfCfcuguAfgCfcugucsasg | 835 |
| 1633094 | | | | | |
| AD- | AGT | ascsaggcUfaCfAfGfgcaauccuguL96 | 489 | asCfsaggAfuUfGfccugUfaGfccuguscsa | 836 |
| 1633095 | | | | | |
| AD- | AGT | ususccuuGfgAfAfGfgacaagaacuL96 | 490 | asGfsuucUfuGfUfccuuCfcAfaggaascsa | 837 |
| 1633119 | | | | | |
| AD- | AGT | cscsuuggAfaGfGfAfcaagaacuguL96 | 491 | asCfsaguUfcUfUfguccUfuCfcaaggsasa | 838 |
| 1633121 | | | | | |
| AD- | AGT | csusuggaAfgGfAfCfaagaacugcuL96 | 492 | asGfscagUfuCfUfugucCfuUfccaagsgsa | 839 |
| 1633122 | | | | | |
| AD- | AGT | csasccugAfaGfCfAfgccguuuguuL96 | 493 | asAfscaaAfcGfGfcugcUfuCfaggugscsa | 840 |
| 1633254 | | | | | |
| AD- | AGT | csusgaagCfaGfCfCfguuugugcauL96 | 494 | asUfsgcaCfaAfAfcggcUfgCfuucagsgsu | 841 |
| 1633257 | | | | | |
| AD- | AGT | ususugugCfaGfGfGfccuggcucuuL96 | 495 | asAfsgagCfcAfGfgcccUfgCfacaaascsg | 842 |
| 1633269 | | | | | |
| AD- | AGT | ususgugcAfgGfGfCfcuggcucucuL96 | 496 | asGfsagaGfcCfAfggccCfuGfcacaasasc | 843 |
| 1633270 | | | | | |
| AD- | AGT | usgsugcaGfgGfCfCfuggcucucuuL96 | 497 | asAfsgagAfgCfCfaggcCfcUfgcacasasa | 844 |
| 1633271 | | | | | |
| AD- | AGT | gsusgcagGfgCfCfUfggcucucuauL96 | 498 | asUfsagaGfaGfCfcaggCfcCfugcacsasa | 845 |
| 1633272 | | | | | |
| AD- | AGT | usgscaggGfcCfUfGfgcucucuauuL96 | 499 | asAfsuagAfgAfGfccagGfcCfcugcascsa | 846 |
| 1633273 | | | | | |
| AD- | AGT | ascsgcucUfcUfGfGfacuucacaguL96 | 500 | asCfsuguGfaAfGfuccaGfaGfagcgusgsg | 847 |
| 1633290 | | | | | |
| AD- | AGT | csgscucuCfuGfGfAfcuucacagauL96 | 501 | asUfscugUfgAfAfguccAfgAfgagcgsusg | 848 |
| 1633291 | | | | | |
| AD- | AGT | csusgagaAfgAfUfUfgacagguucuL96 | 502 | asGfsaacCfuGfUfcaauCfuUfcucagscsa | 849 |
| 1633324 | | | | | |
| AD-84739 | AGT | usgsagaaGfaUfUfGfacagguucauL96 | 503 | asUfsgaaCfcUfGfucaaUfcUfucucasgsc | 850 |
| AD- | AGT | gsasgaagAfuUfGfAfcagguucauuL96 | 504 | asAfsugaAfcCfUfgucaAfuCfuucucsasg | 851 |
| 1633325 | | | | | |
| AD- | AGT | asgsaagaUfuGfAfCfagguucauguL96 | 505 | asCfsaugAfaCfCfugucAfaUfcuucuscsa | 852 |
| 1633326 | | | | | |
| AD- | AGT | gsasagauUfgAfCfAfgguucaugcuL96 | 506 | asGfscauGfaAfCfcuguCfaAfucuucsusc | 853 |
| 1633327 | | | | | |
| AD- | AGT | asasgauuGfaCfAfGfguucaugcauL96 | 507 | asUfsgcaUfgAfAfccugUfcAfaucuuscsu | 854 |
| 1633328 | | | | | |
| AD- | AGT | asgsauugAfcAfGfGfuucaugcaguL96 | 508 | asCfsugcAfuGfAfaccuGfuCfaaucususc | 855 |
| 1633329 | | | | | |
| AD- | AGT | gsasuugaCfaGfGfUfucaugcagguL96 | 509 | asCfscugCfaUfGfaaccUfgUfcaaucsusu | 856 |
| 1633330 | | | | | |
| AD- | AGT | asusugacAfgGfUfUfcaugcaggcuL96 | 510 | asGfsccuGfcAfUfgaacCfuGfucaauscsu | 857 |
| 1633331 | | | | | |
| AD- | AGT | ususgacaGfgUfUfCfaugcaggcuuL96 | 511 | asAfsgccUfgCfAfugaaCfcUfgucaasusc | 858 |
| 1633332 | | | | | |
| AD- | AGT | usgsacagGfuUfCfAfugcaggcuguL96 | 512 | asCfsagcCfuGfCfaugaAfcCfugucasasu | 859 |
| 1633333 | | | | | |
| AD- | AGT | gsascaggUfuCfAfUfgcaggcuguuL96 | 513 | asAfscagCfcUfGfcaugAfaCfcugucsasa | 860 |
| 1633334 | | | | | |
| AD- | AGT | ascsagguUfcAfUfGfcaggcuguguL96 | 514 | asCfsacaGfcCfUfgcauGfaAfccuguscsa | 861 |
| 1633335 | | | | | |
| AD- | AGT | asusgcagGfcUfGfUfgacaggauguL96 | 515 | asCfsaucCfuGfUfcacaGfcCfugcausgsa | 862 |
| 1633343 | | | | | |
| AD- | AGT | gscsaggcUfgUfGfAfcaggauggauL96 | 516 | asUfsccaUfcCfUfgucaCfaGfccugcsasu | 863 |
| 1633345 | | | | | |
| AD- | AGT | csasggcuGfuGfAfCfaggauggaauL96 | 517 | asUfsuccAfuCfCfugucAfcAfgccugscsa | 864 |
| 1633346 | | | | | |
| AD- | AGT | gscsuuucAfaCfAfCfcuacguccauL96 | 518 | asUfsggaCfgUfAfggugUfuGfaaagcscsa | 865 |
| 1633409 | | | | | |
| AD- | AGT | gsasguucUfgGfGfUfggacaacaguL96 | 519 | asCfsuguUfgUfCfcaccCfaGfaacucscsu | 866 |
| 1633453 | | | | | |
| AD- | AGT | gsgsacaaCfaGfCfAfccucaguguuL96 | 520 | asAfscacUfgAfGfgugcUfgUfuguccsasc | 867 |
| 1633464 | | | | | |
| AD- | AGT | gsascaacAfgCfAfCfcucagugucuL96 | 521 | asGfsacaCfuGfAfggugCfuGfuugucscsa | 868 |
| 1633465 | | | | | |
| AD- | AGT | ascsaacaGfcAfCfCfucagugucuuL96 | 522 | asAfsgacAfcUfGfagguGfcUfguuguscsc | 869 |
| 1633466 | | | | | |
| AD- | AGT | csasacagCfaCfCfUfcagugucuguL96 | 523 | asCfsagaCfaCfUfgaggUfgCfuguugsusc | 870 |
| 1633467 | | | | | |
| AD- | AGT | asascagcAfcCfUfCfagugucuguuL96 | 524 | asAfscagAfcAfCfugagGfuGfcuguusgsu | 871 |
| 1633468 | | | | | |
| AD- | AGT | asusgccuCfuGfAfCfcuggacaaguL96 | 525 | asCfsuugUfcCfAfggucAfgAfggcausasg | 872 |
| 1633604 | | | | | |
| AD- | AGT | asasggugGfaGfGfGfucucacuuuuL96 | 526 | asAfsaagUfgAfGfacccUfcCfaccuusgsu | 873 |
| 1633621 | | | | | |
| AD- | AGT | asgsguggAfgGfGfUfcucacuuucuL96 | 527 | asGfsaaaGfuGfAfgaccCfuCfcaccususg | 874 |
| 1633622 | | | | | |
| AD- | AGT | gsgsuggaGfgGfUfCfucacuuuccuL96 | 528 | asGfsgaaAfgUfGfagacCfcUfccaccsusu | 875 |
| 1633623 | | | | | |
| AD- | AGT | gsasggguCfuCfAfCfuuuccagcauL96 | 529 | asUfsgcuGfgAfAfagugAfgAfcccucscsa | 876 |
| 1633627 | | | | | |
| AD- | AGT | asgsggucUfcAfCfUfuuccagcaauL96 | 530 | asUfsugcUfgGfAfaaguGfaGfacccuscsc | 877 |
| 1633628 | | | | | |
| AD- | AGT | gsgsucucAfcUfUfUfccagcaaaauL96 | 531 | asUfsuuuGfcUfGfgaaaGfuGfagaccscsu | 878 |
| 1633630 | | | | | |
| AD- | AGT | gsuscucaCfuUfUfCfcagcaaaacuL96 | 532 | asGfsuuuUfgCfUfggaaAfgUfgagacscsc | 879 |
| 1633631 | | | | | |
| AD- | AGT | uscsucacUfuUfCfCfagcaaaacuuL96 | 533 | asAfsguuUfuGfCfuggaAfaGfugagascsc | 880 |
| 1633632 | | | | | |
| AD- | AGT | csuscacuUfuCfCfAfgcaaaacucuL96 | 534 | asGfsaguUfuUfGfcuggAfaAfgugagsasc | 881 |
| 1633633 | | | | | |
| AD- | AGT | uscsacuuUfcCfAfGfcaaaacuccuL96 | 535 | asGfsgagUfuUfUfgcugGfaAfagugasgsa | 882 |
| 1633634 | | | | | |
| AD- | AGT | csascuuuCfcAfGfCfaaaacucccuL96 | 536 | asGfsggaGfuUfUfugcuGfgAfaagugsasg | 883 |
| 1633635 | | | | | |
| AD- | AGT | ascsuuucCfaGfCfAfaaacucccuuL96 | 537 | asAfsgggAfgUfUfuugcUfgGfaaagusgsa | 884 |
| 1633636 | | | | | |
| AD- | AGT | csusuuccAfgCfAfAfaacucccucuL96 | 538 | asGfsaggGfaGfUfuuugCfuGfgaaagsusg | 885 |
| 1633637 | | | | | |
| AD- | AGT | ususuccaGfcAfAfAfacucccucauL96 | 539 | asUfsgagGfgAfGfuuuuGfcUfggaaasgsu | 886 |
| 1633638 | | | | | |
| AD- | AGT | ususccagCfaAfAfAfcucccucaauL96 | 540 | asUfsugaGfgGfAfguuuUfgCfuggaasasg | 887 |
| 1633639 | | | | | |
| AD- | AGT | uscscagcAfaAfAfCfucccucaacuL96 | 541 | asGfsuugAfgGfGfaguuUfuGfcuggasasa | 888 |
| 1633640 | | | | | |
| AD- | AGT | cscsagcaAfaAfCfUfcccucaacuuL96 | 542 | asAfsguuGfaGfGfgaguUfuUfgcuggsasa | 889 |
| 1633641 | | | | | |
| AD- | AGT | csasgcaaAfaCfUfCfccucaacuguL96 | 543 | asCfsaguUfgAfGfggagUfuUfugcugsgsa | 890 |
| 1633642 | | | | | |
| AD- | AGT | asgscaaaAfcUfCfCfcucaacugguL96 | 544 | asCfscagUfuGfAfgggaGfuUfuugcusgsg | 891 |
| 1633643 | | | | | |
| AD- | AGT | gscsaaaaCfuCfCfCfucaacuggauL96 | 545 | asUfsccaGfuUfGfagggAfgUfuuugcsusg | 892 |
| 1633644 | | | | | |
| AD- | AGT | csasaaacUfcCfCfUfcaacuggauuL96 | 546 | asAfsuccAfgUfUfgaggGfaGfuuuugscsu | 893 |
| 1633645 | | | | | |
| AD- | AGT | asasaacuCfcCfUfCfaacuggauguL96 | 547 | asCfsaucCfaGfUfugagGfgAfguuuusgsc | 894 |
| 1633646 | | | | | |
| AD- | AGT | asasacucCfcUfCfAfacuggaugauL96 | 548 | asUfscauCfcAfGfuugaGfgGfaguuususg | 895 |
| 1633647 | | | | | |
| AD- | AGT | asascuccCfuCfAfAfcuggaugaauL96 | 549 | asUfsucaUfcCfAfguugAfgGfgaguususu | 896 |
| 1633648 | | | | | |
| AD- | AGT | ascsucccUfcAfAfCfuggaugaaguL96 | 550 | asCfsuucAfuCfCfaguuGfaGfggagususu | 897 |
| 1633649 | | | | | |
| AD- | AGT | csuscccuCfaAfCfUfggaugaagauL96 | 551 | asUfscuuCfaUfCfcaguUfgAfgggagsusu | 898 |
| 1633650 | | | | | |
| AD- | AGT | uscsccucAfaCfUfGfgaugaagaauL96 | 552 | asUfsucuUfcAfUfccagUfuGfagggasgsu | 899 |
| 1633651 | | | | | |
| AD- | AGT | cscscucaAfcUfGfGfaugaagaaauL96 | 553 | asUfsuucUfuCfAfuccaGfuUfgagggsasg | 900 |
| 1633652 | | | | | |
| AD-84707 | AGT | cscsucaaCfuGfGfAfugaagaaacuL96 | 7 | asGfsuuuCfuUfCfauccAfgUfugaggsgsa | 901 |
| AD- | AGT | csuscaacUfgGfAfUfgaagaaacuuL96 | 554 | asAfsguuUfcUfUfcaucCfaGfuugagsgsg | 902 |
| 1633653 | | | | | |
| AD- | AGT | asgsgaucUfuAfUfGfaccugcagguL96 | 555 | asCfscugCfaGfGfucauAfaGfauccususg | 903 |
| 1633678 | | | | | |
| AD- | AGT | csusuaugAfcCfUfGfcaggaccuguL96 | 556 | asCfsaggUfcCfUfgcagGfuCfauaagsasu | 904 |
| 1633683 | | | | | |
| AD- | AGT | csgsagcuGfaAfCfCfugcaaaaauuL96 | 557 | asAfsuuuUfuGfCfagguUfcAfgcucgsgsu | 905 |
| 1633732 | | | | | |
| AD- | AGT | gsasgcugAfaCfCfUfgcaaaaauuuL96 | 558 | asAfsauuUfuUfGfcaggUfuCfagcucsgsg | 906 |
| 1633733 | | | | | |
| AD- | AGT | asgscugaAfcCfUfGfcaaaaauuguL96 | 559 | asCfsaauUfuUfUfgcagGfuUfcagcuscsg | 907 |
| 1633734 | | | | | |
| AD- | AGT | gscsugaaCfcUfGfCfaaaaauugauL96 | 560 | asUfscaaUfuUfUfugcaGfgUfucagcsusc | 908 |
| 1633735 | | | | | |
| AD- | AGT | csusgaacCfuGfCfAfaaaauugaguL96 | 561 | asCfsucaAfuUfUfuugcAfgGfuucagscsu | 909 |
| 1633736 | | | | | |
| AD- | AGT | usgsaaccUfgCfAfAfaaauugagcuL96 | 562 | asGfscucAfaUfUfuuugCfaGfguucasgsc | 910 |
| 1633737 | | | | | |
| AD- | AGT | gsasaccuGfcAfAfAfaauugagcauL96 | 563 | asUfsgcuCfaAfUfuuuuGfcAfgguucsasg | 911 |
| 1633738 | | | | | |
| AD- | AGT | asasccugCfaAfAfAfauugagcaauL96 | 564 | asUfsugcUfcAfAfuuuuUfgCfagguuscsa | 912 |
| 1633739 | | | | | |
| AD- | AGT | ascscugcAfaAfAfAfuugagcaauuL96 | 565 | asAfsuugCfuCfAfauuuUfuGfcaggususc | 913 |
| 1633740 | | | | | |
| AD- | AGT | cscsugcaAfaAfAfUfugagcaauguL96 | 566 | asCfsauuGfcUfCfaauuUfuUfgcaggsusu | 914 |
| 1633741 | | | | | |
| AD- | AGT | csusgcaaAfaAfUfUfgagcaaugauL96 | 567 | asUfscauUfgCfUfcaauUfuUfugcagsgsu | 915 |
| 1633742 | | | | | |
| AD- | AGT | usgscaaaAfaUfUfGfagcaaugacuL96 | 568 | asGfsucaUfuGfCfucaaUfuUfuugcasgsg | 916 |
| 1633743 | | | | | |
| AD- | AGT | gsasggugCfuGfAfAfcagcauuuuuL96 | 569 | asAfsaaaUfgCfUfguucAfgCfaccucscsc | 917 |
| 1633759 | | | | | |
| AD- | AGT | asgsgugcUfgAfAfCfagcauuuuuuL96 | 570 | asAfsaaaAfuGfCfuguuCfaGfcaccuscsc | 918 |
| 1684522 | | | | | |
| AD- | AGT | gsgsugcuGfaAfCfAfgcauuuuuuuL96 | 571 | asAfsaaaAfaUfGfcuguUfcAfgcaccsusc | 919 |
| 1684523 | | | | | |
| AD- | AGT | gsusgcugAfaCfAfGfcauuuuuuuuL96 | 572 | asAfsaaaAfaAfUfgcugUfuCfagcacscsu | 920 |
| 1684524 | | | | | |
| AD- | AGT | usgscugaAfcAfGfCfauuuuuuuuuL96 | 573 | asAfsaaaAfaAfAfugcuGfuUfcagcascsc | 921 |
| 1684525 | | | | | |
| AD- | AGT | gscsugaaCfaGfCfAfuuuuuuuuguL96 | 574 | asCfsaaaAfaAfAfaugcUfgUfucagcsasc | 922 |
| 1684526 | | | | | |
| AD- | AGT | csusgaacAfgCfAfUfuuuuuuugauL96 | 575 | asUfscaaAfaAfAfaaugCfuGfuucagscsa | 923 |
| 1684527 | | | | | |
| AD- | AGT | usgsagagAfgAfGfCfccacagaguuL96 | 576 | asAfscucUfgUfGfggcuCfuCfucucasusc | 924 |
| 1633777 | | | | | |
| AD- | AGT | asgsagagAfgCfCfCfacagagucuuL96 | 577 | asAfsgacUfcUfGfugggCfuCfucucuscsa | 925 |
| 1633779 | | | | | |
| AD- | AGT | gsasgagaGfcCfCfAfcagagucuauL96 | 578 | asUfsagaCfuCfUfguggGfcUfcucucsusc | 926 |
| 1633780 | | | | | |
| AD- | AGT | gsasaccgCfcCfAfUfuccuguuuguL96 | 579 | asCfsaaaCfaGfGfaaugGfgCfgguucsasg | 927 |
| 1633840 | | | | | |
| AD- | AGT | asasccgcCfcAfUfUfccuguuugcuL96 | 580 | asGfscaaAfcAfGfgaauGfgGfcgguuscsa | 928 |
| 1633841 | | | | | |
| AD- | AGT | ascscgccCfaUfUfCfcuguuugcuuL96 | 581 | asAfsgcaAfaCfAfggaaUfgGfgcggususc | 929 |
| 1633842 | | | | | |
| AD- | AGT | cscsgcccAfuUfCfCfuguuugcuguL96 | 582 | asCfsagcAfaAfCfaggaAfuGfggcggsusu | 930 |
| 1633843 | | | | | |
| AD- | AGT | csgscccaUfuCfCfUfguuugcuguuL96 | 583 | asAfscagCfaAfAfcaggAfaUfgggcgsgsu | 931 |
| 1633844 | | | | | |
| AD- | AGT | gscsccauUfcCfUfGfuuugcuguguL96 | 584 | asCfsacaGfcAfAfacagGfaAfugggcsgsg | 932 |
| 1633845 | | | | | |
| AD- | AGT | cscscauuCfcUfGfUfuugcuguguuL96 | 585 | asAfscacAfgCfAfaacaGfgAfaugggscsg | 933 |
| 1633846 | | | | | |
| AD-84712 | AGT | cscsauucCfuGfUfUfugcuguguauL96 | 586 | asUfsacaCfaGfCfaaacAfgGfaauggsgsc | 934 |
| AD- | AGT | csasuuccUfgUfUfUfgcuguguauuL96 | 587 | asAfsuacAfcAfGfcaaaCfaGfgaaugsgsg | 935 |
| 1633847 | | | | | |
| AD- | AGT | asusuccuGfuUfUfGfcuguguauguL96 | 588 | asCfsauaCfaCfAfgcaaAfcAfggaausgsg | 936 |
| 1633848 | | | | | |
| AD- | AGT | ususccugUfuUfGfCfuguguaugauL96 | 589 | asUfscauAfcAfCfagcaAfaCfaggaasusg | 937 |
| 1633849 | | | | | |
| AD- | AGT | uscscuguUfuGfCfUfguguaugauuL96 | 590 | asAfsucaUfaCfAfcagcAfaAfcaggasasu | 938 |
| 1633850 | | | | | |
| AD- | AGT | cscsuguuUfgCfUfGfuguaugaucuL96 | 591 | asGfsaucAfuAfCfacagCfaAfacaggsasa | 939 |
| 1633851 | | | | | |
| AD- | AGT | csusguuuGfcUfGfUfguaugaucauL96 | 592 | asUfsgauCfaUfAfcacaGfcAfaacagsgsa | 940 |
| 1633852 | | | | | |
| AD- | AGT | usgsuuugCfuGfUfGfuaugaucaauL96 | 593 | asUfsugaUfcAfUfacacAfgCfaaacasgsg | 941 |
| 1633853 | | | | | |
| AD- | AGT | gsusuugcUfgUfGfUfaugaucaaauL96 | 594 | asUfsuugAfuCfAfuacaCfaGfcaaacsasg | 942 |
| 1633854 | | | | | |
| AD- | AGT | ususugcuGfuGfUfAfugaucaaaguL96 | 595 | asCfsuuuGfaUfCfauacAfcAfgcaaascsa | 943 |
| 1633855 | | | | | |
| AD- | AGT | cscsccagUfcUfCfCfcaccuuuucuL96 | 596 | asGfsaaaAfgGfUfgggaGfaCfuggggsgsu | 944 |
| 1684528 | | | | | |
| AD- | AGT | cscscaguCfuCfCfCfaccuuuucuuL96 | 597 | asAfsgaaAfaGfGfugggAfgAfcugggsgsg | 945 |
| 1684530 | | | | | |
| AD- | AGT | cscsagucUfcCfCfAfccuuuucuuuL96 | 598 | asAfsagaAfaAfGfguggGfaGfacuggsgsg | 946 |
| 1684532 | | | | | |
| AD- | AGT | asgsucucCfcAfCfCfuuuucuucuuL96 | 599 | asAfsgaaGfaAfAfagguGfgGfagacusgsg | 947 |
| 1684534 | | | | | |
| AD- | AGT | gsuscuccCfaCfCfUfuuucuucuauL96 | 600 | asUfsagaAfgAfAfaaggUfgGfgagacsusg | 948 |
| 1633946 | | | | | |
| AD-67328 | AGT | uscsucccAfcCfUfUfuucuucuaauL96 | 5 | asUfsuagAfaGfAfaaagGfuGfggagascsu | 949 |
| AD- | AGT | csuscccaCfcUfUfUfucuucuaauuL96 | 601 | asAfsuuaGfaAfGfaaaaGfgUfgggagsasc | 950 |
| 1633947 | | | | | |
| AD- | AGT | uscsccacCfuUfUfUfcuucuaauguL96 | 602 | asCfsauuAfgAfAfgaaaAfgGfugggasgsa | 951 |
| 1633948 | | | | | |
| AD- | AGT | cscscaccUfuUfUfCfuucuaaugauL96 | 603 | asUfscauUfaGfAfagaaAfaGfgugggsasg | 952 |
| 1633949 | | | | | |
| AD-84700 | AGT | cscsaccuUfuUfCfUfucuaaugaguL96 | 604 | asCfsucaUfuAfGfaagaAfaAfgguggsgsa | 953 |
| AD- | AGT | csasccuuUfuCfUfUfcuaaugaguuL96 | 605 | asAfscucAfuUfAfgaagAfaAfaggugsgsg | 954 |
| 1633950 | | | | | |
| AD- | AGT | ascscuuuUfcUfUfCfuaaugagucuL96 | 606 | asGfsacuCfaUfUfagaaGfaAfaaggusgsg | 955 |
| 1633951 | | | | | |
| AD- | AGT | cscsguuuCfuCfCfUfuggucuaaguL96 | 607 | asCfsuuaGfaCfCfaaggAfgAfaacggscsu | 956 |
| 1633991 | | | | | |
| AD- | AGT | csgsuuucUfcCfUfUfggucuaaguuL96 | 608 | asAfscuuAfgAfCfcaagGfaGfaaacgsgsc | 957 |
| 1633992 | | | | | |
| AD- | AGT | gsusuucuCfcUfUfGfgucuaaguguL96 | 609 | asCfsacuUfaGfAfccaaGfgAfgaaacsgsg | 958 |
| 1633993 | | | | | |
| AD- | AGT | gsusuugcUfgGfGfUfuuauuuuaguL96 | 610 | asCfsuaaAfaUfAfaaccCfaGfcaaacsusg | 959 |
| 1634065 | | | | | |
| AD- | AGT | ususugcuGfgGfUfUfuauuuuagauL96 | 611 | asUfscuaAfaAfUfaaacCfcAfgcaaascsu | 960 |
| 1634066 | | | | | |
| AD- | AGT | ususgcugGfgUfUfUfauuuuagaguL96 | 612 | asCfsucuAfaAfAfuaaaCfcCfagcaasasc | 961 |
| 1634067 | | | | | |
| AD- | AGT | usgscuggGfuUfUfAfuuuuagagauL96 | 613 | asUfscucUfaAfAfauaaAfcCfcagcasasa | 962 |
| 1634068 | | | | | |
| AD-84730 | AGT | gscsugggUfuUfAfUfuuuagagaauL96 | 614 | asUfsucuCfuAfAfaauaAfaCfccagcsasa | 963 |
| AD- | AGT | csusggguUfuAfUfUfuuagagaauuL96 | 615 | asAfsuucUfcUfAfaaauAfaAfcccagscsa | 964 |
| 1634069 | | | | | |
| AD- | AGT | usgsgguuUfaUfUfUfuagagaauguL96 | 616 | asCfsauuCfuCfUfaaaaUfaAfacccasgsc | 965 |
| 1634070 | | | | | |
| AD- | AGT | gsgsguuuAfuUfUfUfagagaaugguL96 | 617 | asCfscauUfcUfCfuaaaAfuAfaacccsasg | 966 |
| 1634071 | | | | | |
| AD- | AGT | gsgsuuuaUfuUfUfAfgagaauggguL96 | 618 | asCfsccaUfuCfUfcuaaAfaUfaaaccscsa | 967 |
| 1684536 | | | | | |
| AD- | AGT | gsusuuauUfuUfAfGfagaaugggguL96 | 619 | asCfscccAfuUfCfucuaAfaAfuaaacscsc | 968 |
| 1684538 | | | | | |
| AD- | AGT | ususuauuUfuAfGfAfgaauggggguL96 | 620 | asCfscccCfaUfUfcucuAfaAfauaaascsc | 969 |
| 1684540 | | | | | |
| AD- | AGT | asgsaaugGfgGfGfUfggggaggcauL96 | 621 | asUfsgccUfcCfCfcaccCfcCfauucuscsu | 970 |
| 1684542 | | | | | |
| AD- | AGT | gsasauggGfgGfUfGfgggaggcaauL96 | 622 | asUfsugcCfuCfCfccacCfcCfcauucsusc | 971 |
| 1684544 | | | | | |
| AD- | AGT | asasugggGfgUfGfGfggaggcaaguL96 | 623 | asCfsuugCfcUfCfcccaCfcCfccauuscsu | 972 |
| 1684546 | | | | | |
| AD- | AGT | asusggggGfuGfGfGfgaggcaagauL96 | 624 | asUfscuuGfcCfUfccccAfcCfcccaususc | 973 |
| 1684548 | | | | | |
| AD- | AGT | usgsggggUfgGfGfGfaggcaagaauL96 | 625 | asUfsucuUfgCfCfucccCfaCfccccasusu | 974 |
| 1684550 | | | | | |
| AD- | AGT | gsgsggguGfgGfGfAfggcaagaacuL96 | 626 | asGfsuucUfuGfCfcuccCfcAfcccccsasu | 975 |
| 1684552 | | | | | |
| AD- | AGT | gsusggggAfgGfCfAfagaaccaguuL96 | 627 | asAfscugGfuUfCfuugcCfuCfcccacscsc | 976 |
| 1684554 | | | | | |
| AD- | AGT | usgsgggaGfgCfAfAfgaaccaguguL96 | 628 | asCfsacuGfgUfUfcuugCfcUfccccascsc | 977 |
| 1684556 | | | | | |
| AD- | AGT | gsgsggagGfcAfAfGfaaccaguguuL96 | 629 | asAfscacUfgGfUfucuuGfcCfuccccsasc | 978 |
| 1684558 | | | | | |
| AD- | AGT | gsgsgaggCfaAfGfAfaccaguguuuL96 | 630 | asAfsacaCfuGfGfuucuUfgCfcucccscsa | 979 |
| 1634072 | | | | | |
| AD- | AGT | gsgsaggcAfaGfAfAfccaguguuuuL96 | 631 | asAfsaacAfcUfGfguucUfuGfccuccscsc | 980 |
| 1634073 | | | | | |
| AD- | AGT | gsasggcaAfgAfAfCfcaguguuuauL96 | 632 | asUfsaaaCfaCfUfgguuCfuUfgccucscsc | 981 |
| 1634074 | | | | | |
| AD- | AGT | asgsgcaaGfaAfCfCfaguguuuaguL96 | 633 | asCfsuaaAfcAfCfugguUfcUfugccuscsc | 982 |
| 1634075 | | | | | |
| AD- | AGT | gsgscaagAfaCfCfAfguguuuagcuL96 | 634 | asGfscuaAfaCfAfcuggUfuCfuugccsusc | 983 |
| 1634076 | | | | | |
| AD- | AGT | gscsaagaAfcCfAfGfuguuuagcguL96 | 635 | asCfsgcuAfaAfCfacugGfuUfcuugcscsu | 984 |
| 1634077 | | | | | |
| AD- | AGT | csasagaaCfcAfGfUfguuuagcgcuL96 | 636 | asGfscgcUfaAfAfcacuGfgUfucuugscsc | 985 |
| 1634078 | | | | | |
| AD- | AGT | asasgaacCfaGfUfGfuuuagcgcguL96 | 637 | asCfsgcgCfuAfAfacacUfgGfuucuusgsc | 986 |
| 1634079 | | | | | |
| AD- | AGT | asgsaaccAfgUfGfUfuuagcgcgguL96 | 638 | asCfscgcGfcUfAfaacaCfuGfguucususg | 987 |
| 1634080 | | | | | |
| AD- | AGT | gsasaccaGfuGfUfUfuagcgcggguL96 | 639 | asCfsccgCfgCfUfaaacAfcUfgguucsusu | 988 |
| 1634081 | | | | | |
| AD- | AGT | asasccagUfgUfUfUfagcgcgggauL96 | 640 | asUfscccGfcGfCfuaaaCfaCfugguuscsu | 989 |
| 1634082 | | | | | |
| AD- | AGT | csusguucCfaAfAfAfagaauuccauL96 | 641 | asUfsggaAfuUfCfuuuuUfgGfaacagsusa | 990 |
| 1634105 | | | | | |
| AD- | AGT | gsusuccaAfaAfAfGfaauuccaacuL96 | 642 | asGfsuugGfaAfUfucuuUfuUfggaacsasg | 991 |
| 1634107 | | | | | |
| AD- | AGT | uscscaaaAfaGfAfAfuuccaaccguL96 | 643 | asCfsgguUfgGfAfauucUfuUfuuggasasc | 992 |
| 1634109 | | | | | |
| AD- | AGT | cscsaaaaAfgAfAfUfuccaaccgauL96 | 644 | asUfscggUfuGfGfaauuCfuUfuuuggsasa | 993 |
| 1634110 | | | | | |
| AD- | AGT | csasaaaaGfaAfUfUfccaaccgacuL96 | 645 | asGfsucgGfuUfGfgaauUfcUfuuuugsgsa | 994 |
| 1634111 | | | | | |
| AD- | AGT | asasaaagAfaUfUfCfcaaccgaccuL96 | 646 | asGfsgucGfgUfUfggaaUfuCfuuuuusgsg | 995 |
| 1634112 | | | | | |
| AD- | AGT | asasaagaAfuUfCfCfaaccgaccauL96 | 647 | asUfsgguCfgGfUfuggaAfuUfcuuuususg | 996 |
| 1634113 | | | | | |
| AD- | AGT | asasagaaUfuCfCfAfaccgaccaguL96 | 648 | asCfsuggUfcGfGfuuggAfaUfucuuususu | 997 |
| 1634114 | | | | | |
| AD- | AGT | asasgaauUfcCfAfAfccgaccagcuL96 | 649 | asGfscugGfuCfGfguugGfaAfuucuususu | 998 |
| 1634115 | | | | | |
| AD-84724 | AGT | asgsaauuCfcAfAfCfcgaccagcuuL96 | 650 | asAfsgcuGfgUfCfgguuGfgAfauucususu | 999 |
| AD- | AGT | gsasauucCfaAfCfCfgaccagcuuuL96 | 651 | asAfsagcUfgGfUfcgguUfgGfaauucsusu | 1000 |
| 1634116 | | | | | |
| AD- | AGT | asasuuccAfaCfCfGfaccagcuuguL96 | 652 | asCfsaagCfuGfGfucggUfuGfgaauuscsu | 1001 |
| 1634117 | | | | | |
| AD- | AGT | asusuccaAfcCfGfAfccagcuuguuL96 | 653 | asAfscaaGfcUfGfgucgGfuUfggaaususc | 1002 |
| 1634118 | | | | | |
| AD-68579 | AGT | ususccaaCfcGfAfCfcagcuuguuuL96 | 654 | asAfsacaAfgCfUfggucGfgUfuggaasusu | 1003 |
| AD- | AGT | uscscaacCfgAfCfCfagcuuguuuuL96 | 655 | asAfsaacAfaGfCfugguCfgGfuuggasasu | 1004 |
| 1634119 | | | | | |
| AD- | AGT | cscsaaccGfaCfCfAfgcuuguuuguL96 | 656 | asCfsaaaCfaAfGfcuggUfcGfguuggsasa | 1005 |
| 1634120 | | | | | |
| AD- | AGT | csasaccgAfcCfAfGfcuuguuuguuL96 | 657 | asAfscaaAfcAfAfgcugGfuCfgguugsgsa | 1006 |
| 1634121 | | | | | |
| AD- | AGT | asasccgaCfcAfGfCfuuguuuguguL96 | 658 | asCfsacaAfaCfAfagcuGfgUfcgguusgsg | 1007 |
| 1634122 | | | | | |
| AD- | AGT | ascscgacCfaGfCfUfuguuugugauL96 | 659 | asUfscacAfaAfCfaagcUfgGfucggususg | 1008 |
| 1634123 | | | | | |
| AD- | AGT | cscsgaccAfgCfUfUfguuugugaauL96 | 660 | asUfsucaCfaAfAfcaagCfuGfgucggsusu | 1009 |
| 1634124 | | | | | |
| AD- | AGT | csgsaccaGfcUfUfGfuuugugaaauL96 | 661 | asUfsuucAfcAfAfacaaGfcUfggucgsgsu | 1010 |
| 1634125 | | | | | |
| AD- | AGT | gsasccagCfuUfGfUfuugugaaacuL96 | 662 | asGfsuuuCfaCfAfaacaAfgCfuggucsgsg | 1011 |
| 1634126 | | | | | |
| AD- | AGT | ascscagcUfuGfUfUfugugaaacauL96 | 663 | asUfsguuUfcAfCfaaacAfaGfcugguscsg | 1012 |
| 1634127 | | | | | |
| AD- | AGT | cscsagcuUfgUfUfUfgugaaacaauL96 | 664 | asUfsuguUfuCfAfcaaaCfaAfgcuggsusc | 1013 |
| 1634128 | | | | | |
| AD- | AGT | csasgcuuGfuUfUfGfugaaacaaauL96 | 665 | asUfsuugUfuUfCfacaaAfcAfagcugsgsu | 1014 |
| 1634129 | | | | | |
| AD- | AGT | asgscuugUfuUfGfUfgaaacaaaauL96 | 666 | asUfsuuuGfuUfUfcacaAfaCfaagcusgsg | 1015 |
| 1634130 | | | | | |
| AD- | AGT | gscsuuguUfuGfUfGfaaacaaaaauL96 | 667 | asUfsuuuUfgUfUfucacAfaAfcaagcsusg | 1016 |
| 1684562 | | | | | |
| AD- | AGT | csusuguuUfgUfGfAfaacaaaaaauL96 | 668 | asUfsuuuUfuGfUfuucaCfaAfacaagscsu | 1017 |
| 1684563 | | | | | |
| AD- | AGT | ususguuuGfuGfAfAfacaaaaaaguL96 | 669 | asCfsuuuUfuUfGfuuucAfcAfaacaasgsc | 1018 |
| 1684564 | | | | | |
| AD- | AGT | usgsuuccCfuUfUfUfcaaguugaguL96 | 670 | asCfsucaAfcUfUfgaaaAfgGfgaacascsu | 1019 |
| 1634135 | | | | | |
| AD- | AGT | gsusucccUfuUfUfCfaaguugagauL96 | 671 | asUfscucAfaCfUfugaaAfaGfggaacsasc | 1020 |
| 1634136 | | | | | |
| AD- | AGT | ususcccuUfuUfCfAfaguugagaauL96 | 672 | asUfsucuCfaAfCfuugaAfaAfgggaascsa | 1021 |
| 1634137 | | | | | |
| AD- | AGT | csasaguuGfaGfAfAfcaaaaauuguL96 | 673 | asCfsaauUfuUfUfguucUfcAfacuugsasa | 1022 |
| 1634146 | | | | | |
| AD- | AGT | asasguugAfgAfAfCfaaaaauugguL96 | 674 | asCfscaaUfuUfUfuguuCfuCfaacuusgsa | 1023 |
| 1634147 | | | | | |
| AD-68585 | AGT | asgsuugaGfaAfCfAfaaaauuggguL96 | 675 | asCfsccaAfuUfUfuuguUfcUfcaacususg | 1024 |
| AD- | AGT | gsusugagAfaCfAfAfaaauuggguuL96 | 676 | asAfscccAfaUfUfuuugUfuCfucaacsusu | 1025 |
| 1634148 | | | | | |
| AD- | AGT | ususgagaAfcAfAfAfaauuggguuuL96 | 677 | asAfsaccCfaAfUfuuuuGfuUfcucaascsu | 1026 |
| 1634149 | | | | | |
| AD- | AGT | usgsagaaCfaAfAfAfauuggguuuuL96 | 678 | asAfsaacCfcAfAfuuuuUfgUfucucasasc | 1027 |
| 1634150 | | | | | |
| AD- | AGT | gsasgaacAfaAfAfAfuuggguuuuuL96 | 679 | asAfsaaaCfcCfAfauuuUfuGfuucucsasa | 1028 |
| 1634151 | | | | | |
| AD- | AGT | asgsaacaAfaAfAfUfuggguuuuauL96 | 680 | asUfsaaaAfcCfCfaauuUfuUfguucuscsa | 1029 |
| 1634152 | | | | | |
| AD- | AGT | gsasacaaAfaAfUfUfggguuuuaauL96 | 681 | asUfsuaaAfaCfCfcaauUfuUfuguucsusc | 1030 |
| 1634153 | | | | | |
| AD- | AGT | asgsuauaCfaUfUfUfuugcauugcuL96 | 682 | asGfscaaUfgCfAfaaaaUfgUfauacususu | 1031 |
| 1634162 | | | | | |
| AD- | AGT | gsusauacAfuUfUfUfugcauugccuL96 | 683 | asGfsgcaAfuGfCfaaaaAfuGfuauacsusu | 1032 |
| 1634163 | | | | | |
| AD- | AGT | usasuacaUfuUfUfUfgcauugccuuL96 | 684 | asAfsggcAfaUfGfcaaaAfaUfguauascsu | 1033 |
| 1634164 | | | | | |
| AD- | AGT | asusacauUfuUfUfGfcauugccuuuL96 | 685 | asAfsaggCfaAfUfgcaaAfaAfuguausasc | 1034 |
| 1634165 | | | | | |
| AD- | AGT | asusuuuuGfcAfUfUfgccuucgguuL96 | 686 | asAfsccgAfaGfGfcaauGfcAfaaaausgsu | 1035 |
| 1634169 | | | | | |
| AD- | AGT | ususuuugCfaUfUfGfccuucgguuuL96 | 687 | asAfsaccGfaAfGfgcaaUfgCfaaaaasusg | 1036 |
| 1634170 | | | | | |
| AD- | AGT | ususuugcAfuUfGfCfcuucgguuuuL96 | 688 | asAfsaacCfgAfAfggcaAfuGfcaaaasasu | 1037 |
| 1634171 | | | | | |
| AD- | AGT | ususugcaUfuGfCfCfuucgguuuguL96 | 689 | asCfsaaaCfcGfAfaggcAfaUfgcaaasasa | 1038 |
| 1634172 | | | | | |
| AD- | AGT | ususgcauUfgCfCfUfucgguuuguuL96 | 690 | asAfscaaAfcCfGfaaggCfaAfugcaasasa | 1039 |
| 1634173 | | | | | |
| AD- | AGT | usgscauuGfcCfUfUfcgguuuguauL96 | 691 | asUfsacaAfaCfCfgaagGfcAfaugcasasa | 1040 |
| 1634174 | | | | | |
| AD- | AGT | gscsauugCfcUfUfCfgguuuguauuL96 | 692 | asAfsuacAfaAfCfcgaaGfgCfaaugcsasa | 1041 |
| 1634175 | | | | | |
| AD- | AGT | csasuugcCfuUfCfGfguuuguauuuL96 | 693 | asAfsauaCfaAfAfccgaAfgGfcaaugscsa | 1042 |
| 1634176 | | | | | |
| AD- | AGT | asusugccUfuCfGfGfuuuguauuuuL96 | 694 | asAfsaauAfcAfAfaccgAfaGfgcaausgsc | 1043 |
| 1634177 | | | | | |
| AD- | AGT | ususgccuUfcGfGfUfuuguauuuauL96 | 695 | asUfsaaaUfaCfAfaaccGfaAfggcaasusg | 1044 |
| 1634178 | | | | | |
| AD- | AGT | usgsccuuCfgGfUfUfuguauuuaguL96 | 696 | asCfsuaaAfuAfCfaaacCfgAfaggcasasu | 1045 |
| 1634179 | | | | | |
| AD- | AGT | gscscuucGfgUfUfUfguauuuaguuL96 | 697 | asAfscuaAfaUfAfcaaaCfcGfaaggcsasa | 1046 |
| 1634180 | | | | | |
| AD- | AGT | cscsuucgGfuUfUfGfuauuuaguguL96 | 698 | asCfsacuAfaAfUfacaaAfcCfgaaggscsa | 1047 |
| 1634181 | | | | | |
| AD- | AGT | csusucggUfuUfGfUfauuuaguguuL96 | 699 | asAfscacUfaAfAfuacaAfaCfcgaagsgsc | 1048 |
| 1634182 | | | | | |
| AD- | AGT | ususcgguUfuGfUfAfuuuagugucuL96 | 700 | asGfsacaCfuAfAfauacAfaAfccgaasgsg | 1049 |
| 1634183 | | | | | |
| AD- | AGT | uscsgguuUfgUfAfUfuuagugucuuL96 | 701 | asAfsgacAfcUfAfaauaCfaAfaccgasasg | 1050 |
| 1634184 | | | | | |
| AD- | AGT | csgsguuuGfuAfUfUfuagugucuuuL96 | 702 | asAfsagaCfaCfUfaaauAfcAfaaccgsasa | 1051 |
| 1634185 | | | | | |
| AD- | AGT | gsgsuuugUfaUfUfUfagugucuuguL96 | 703 | asCfsaagAfcAfCfuaaaUfaCfaaaccsgsa | 1052 |
| 1634186 | | | | | |
| AD- | AGT | gsusuuguAfuUfUfAfgugucuugauL96 | 704 | asUfscaaGfaCfAfcuaaAfuAfcaaacscsg | 1053 |
| 1634187 | | | | | |
| AD- | AGT | ususuguaUfuUfAfGfugucuugaauL96 | 705 | asUfsucaAfgAfCfacuaAfaUfacaaascsc | 1054 |
| 1634188 | | | | | |
| AD- | AGT | ususguauUfuAfGfUfgucuugaauuL96 | 706 | asAfsuucAfaGfAfcacuAfaAfuacaasasc | 1055 |
| 1634189 | | | | | |
| AD- | AGT | usgsuauuUfaGfUfGfucuugaauguL96 | 707 | asCfsauuCfaAfGfacacUfaAfauacasasa | 1056 |
| 1634190 | | | | | |
| AD- | AGT | gsusauuuAfgUfGfUfcuugaauguuL96 | 708 | asAfscauUfcAfAfgacaCfuAfaauacsasa | 1057 |
| 1634191 | | | | | |
| AD- | AGT | usasuuuaGfuGfUfCfuugaauguauL96 | 709 | asUfsacaUfuCfAfagacAfcUfaaauascsa | 1058 |
| 1634192 | | | | | |
| AD- | AGT | asusuuagUfgUfCfUfugaauguaauL96 | 710 | asUfsuacAfuUfCfaagaCfaCfuaaausasc | 1059 |
| 1634193 | | | | | |
| AD- | AGT | ususuaguGfuCfUfUfgaauguaaguL96 | 711 | asCfsuuaCfaUfUfcaagAfcAfcuaaasusa | 1060 |
| 1634194 | | | | | |
| AD- | AGT | ususagugUfcUfUfGfaauguaagauL96 | 712 | asUfscuuAfcAfUfucaaGfaCfacuaasasu | 1061 |
| 1634195 | | | | | |
| AD- | AGT | usasguguCfuUfGfAfauguaagaauL96 | 713 | asUfsucuUfaCfAfuucaAfgAfcacuasasa | 1062 |
| 1634196 | | | | | |
| AD- | AGT | asgsugucUfuGfAfAfuguaagaacuL96 | 714 | asGfsuucUfuAfCfauucAfaGfacacusasa | 1063 |
| 1634197 | | | | | |
| AD- | AGT | usgsucuuGfaAfUfGfuaagaacauuL96 | 715 | asAfsuguUfcUfUfacauUfcAfagacascsu | 1064 |
| 1634199 | | | | | |
| AD- | AGT | gsuscuugAfaUfGfUfaagaacauguL96 | 716 | asCfsaugUfuCfUfuacaUfuCfaagacsasc | 1065 |
| 1634200 | | | | | |
| AD- | AGT | ususgaauGfuAfAfGfaacaugaccuL96 | 717 | asGfsgucAfuGfUfucuuAfcAfuucaasgsa | 1066 |
| 1634203 | | | | | |
| AD- | AGT | gsusaagaAfcAfUfGfaccuccguguL96 | 718 | asCfsacgGfaGfGfucauGfuUfcuuacsasu | 1067 |
| 1634209 | | | | | |
| AD- | AGT | usasagaaCfaUfGfAfccuccguguuL96 | 719 | asAfscacGfgAfGfgucaUfgUfucuuascsa | 1068 |
| 1634210 | | | | | |
| AD- | AGT | asasgaacAfuGfAfCfcuccguguauL96 | 720 | asUfsacaCfgGfAfggucAfuGfuucuusasc | 1069 |
| 1634211 | | | | | |
| AD- | AGT | asgsaacaUfgAfCfCfuccguguaguL96 | 721 | asCfsuacAfcGfGfagguCfaUfguucususa | 1070 |
| 1634212 | | | | | |
| AD- | AGT | gsasacauGfaCfCfUfccguguaguuL96 | 722 | asAfscuaCfaCfGfgaggUfcAfuguucsusu | 1071 |
| 1634213 | | | | | |
| AD- | AGT | asascaugAfcCfUfCfcguguaguguL96 | 723 | asCfsacuAfcAfCfggagGfuCfauguuscsu | 1072 |
| 1634214 | | | | | |
| AD- | AGT | ascsaugaCfcUfCfCfguguaguguuL96 | 724 | asAfscacUfaCfAfcggaGfgUfcaugususc | 1073 |
| 1634215 | | | | | |
| AD- | AGT | csasugacCfuCfCfGfuguagugucuL96 | 725 | asGfsacaCfuAfCfacggAfgGfucaugsusu | 1074 |
| 1634216 | | | | | |
| AD- | AGT | asusgaccUfcCfGfUfguagugucuuL96 | 726 | asAfsgacAfcUfAfcacgGfaGfgucausgsu | 1075 |
| 1634217 | | | | | |
| AD- | AGT | csusuaguUfuUfUfUfccacagauguL96 | 727 | asCfsaucUfgUfGfgaaaAfaAfcuaagsgsu | 1076 |
| 1684565 | | | | | |
| AD- | AGT | ususaguuUfuUfUfCfcacagaugcuL96 | 728 | asGfscauCfuGfUfggaaAfaAfacuaasgsg | 1077 |
| 1684566 | | | | | |
| AD- | AGT | usasguuuUfuUfCfCfacagaugcuuL96 | 729 | asAfsgcaUfcUfGfuggaAfaAfaacuasasg | 1078 |
| 1684567 | | | | | |
| AD- | AGT | gsusuuuuUfcCfAfCfagaugcuuguL96 | 730 | asCfsaagCfaUfCfugugGfaAfaaaacsusa | 1079 |
| 1684568 | | | | | |
| AD- | AGT | ususuuucCfaCfAfGfaugcuuguguL96 | 731 | asCfsacaAfgCfAfucugUfgGfaaaaasasc | 1080 |
| 1684569 | | | | | |
| AD- | AGT | ususuuccAfcAfGfAfugcuugugauL96 | 732 | asUfscacAfaGfCfaucuGfuGfgaaaasasa | 1081 |
| 1684570 | | | | | |
| AD- | AGT | ususuccaCfaGfAfUfgcuugugauuL96 | 733 | asAfsucaCfaAfGfcaucUfgUfggaaasasa | 1082 |
| 1634234 | | | | | |
| AD- | AGT | ususccacAfgAfUfGfcuugugauuuL96 | 734 | asAfsaucAfcAfAfgcauCfuGfuggaasasa | 1083 |
| 1634235 | | | | | |
| AD- | AGT | uscscacaGfaUfGfCfuugugauuuuL96 | 735 | asAfsaauCfaCfAfagcaUfcUfguggasasa | 1084 |
| 1634236 | | | | | |
| AD- | AGT | cscsacagAfuGfCfUfugugauuuuuL96 | 736 | asAfsaaaUfcAfCfaagcAfuCfuguggsasa | 1085 |
| 1634237 | | | | | |
| AD- | AGT | csascagaUfgCfUfUfgugauuuuuuL96 | 737 | asAfsaaaAfuCfAfcaagCfaUfcugugsgsa | 1086 |
| 1634238 | | | | | |
| AD- | AGT | ascscugaAfuUfUfCfuguuugaauuL96 | 738 | asAfsuucAfaAfCfagaaAfuUfcaggusgsc | 1087 |
| 1634282 | | | | | |
| AD- | AGT | cscsugaaUfuUfCfUfguuugaauguL96 | 739 | asCfsauuCfaAfAfcagaAfaUfucaggsusg | 1088 |
| 1634283 | | | | | |
| AD- | AGT | gsgsaaccAfuAfGfCfugguuauuuuL96 | 740 | asAfsaauAfaCfCfagcuAfuGfguuccsgsc | 1089 |
| 1634304 | | | | | |
| AD- | AGT | gsasaccaUfaGfCfUfgguuauuucuL96 | 741 | asGfsaaaUfaAfCfcagcUfaUfgguucscsg | 1090 |
| 1634305 | | | | | |
| AD- | AGT | asasccauAfgCfUfGfguuauuucuuL96 | 742 | asAfsgaaAfuAfAfccagCfuAfugguuscsc | 1091 |
| 1634306 | | | | | |
| AD- | AGT | ascscauaGfcUfGfGfuuauuucucuL96 | 743 | asGfsagaAfaUfAfaccaGfcUfauggususc | 1092 |
| 1634307 | | | | | |
| AD- | AGT | cscsauagCfuGfGfUfuauuucuccuL96 | 744 | asGfsgagAfaAfUfaaccAfgCfuauggsusu | 1093 |
| 1634308 | | | | | |
| AD- | AGT | cscsuuguGfuUfAfGfuaauaaacguL96 | 745 | asCfsguuUfaUfUfacuaAfcAfcaaggsgsa | 1094 |
| 1634327 | | | | | |
| AD- | AGT | csusugugUfuAfGfUfaauaaacguuL96 | 746 | asAfscguUfuAfUfuacuAfaCfacaagsgsg | 1095 |
| 1634328 | | | | | |
| AD- | AGT | ususguguUfaGfUfAfauaaacgucuL96 | 747 | asGfsacgUfuUfAfuuacUfaAfcacaasgsg | 1096 |
| 1634329 | | | | | |
| AD- | AGT | usgsuguuAfgUfAfAfuaaacgucuuL96 | 748 | asAfsgacGfuUfUfauuaCfuAfacacasasg | 1097 |
| 1634330 | | | | | |
| AD- | AGT | gsusguuaGfuAfAfUfaaacgucuuuL96 | 749 | asAfsagaCfgUfUfuauuAfcUfaacacsasa | 1098 |
| 1634331 | | | | | |
| AD- | AGT | usgsuuagUfaAfUfAfaacgucuuguL96 | 750 | asCfsaagAfcGfUfuuauUfaCfuaacascsa | 1099 |
| 1634332 | | | | | |
| AD- | AGT | gsusuaguAfaUfAfAfacgucuugcuL96 | 751 | asGfscaaGfaCfGfuuuaUfuAfcuaacsasc | 1100 |
| 1634333 | | | | | |

TABLE 4
Abbreviations of nucleotide monomers used in nucleic acid sequence representation*

| Abbreviation | Nucleotide(s) |
|---|---|
| A | Adenosine-3′-phosphate |
| Ab | beta-L-adenosine-3′-phosphate |
| Abs | beta-L-adenosine-3′-phosphorothioate |
| Af | 2′-fluoroadenosine-3′-phosphate |
| Afs | 2′-fluoroadenosine-3′-phosphorothioate |
| As | adenosine-3′-phosphorothioate |
| C | cytidine-3′-phosphate |
| Cb | beta-L-cytidine-3′-phosphate |
| Cbs | beta-L-cytidine-3′-phosphorothioate |
| Cf | 2′-fluorocytidine-3′-phosphate |
| Cfs | 2′-fluorocytidine-3′-phosphorothioate |
| Cs | cytidine-3′-phosphorothioate |
| G | guanosine-3′-phosphate |
| Gb | beta-L-guanosine-3′-phosphate |
| Gbs | beta-L-guanosine-3′-phosphorothioate |
| Gf | 2′-fluoroguanosine-3′-phosphate |
| Gfs | 2′-fluoroguanosine-3′-phosphorothioate |
| Gs | guanosine-3′-phosphorothioate |
| T | 5′-methyluridine-3′-phosphate |
| Tf | 2′-fluoro-5-methyluridine-3′-phosphate |
| Tfs | 2′-fluoro-5-methyluridine-3′-phosphorothioate |
| Ts | 5-methyluridine-3′-phosphorothioate |
| U | Uridine-3′-phosphate |
| Uf | 2′-fluorouridine-3′-phosphate |
| Ufs | 2′-fluorouridine-3′-phosphorothioate |
| Us | uridine-3′-phosphorothioate |
| N | any nucleotide, modified or unmodified |
| a | 2′-O-methyladenosine-3′-phosphate |
| as | 2′-O-methyladenosine-3′-phosphorothioate |
| c | 2′-O-methylcytidine-3′-phosphate |
| CS | 2′-O-methylcytidine-3′-phosphorothioate |
| g | 2′-O-methylguanosine-3′-phosphate |
| gs | 2′-O-methylguanosine-3′-phosphorothioate |
| t | 2′-O-methyl-5-methyluridine-3′-phosphate |
| ts | 2′-O-methyl-5-methyluridine-3′-phosphorothioate |
| u | 2′-O-methyluridine-3′-phosphate |
| us | 2′-O-methyluridine-3′-phosphorothioate |
| s | phosphorothioate linkage |
| L96 | N-[tris(GalNAc-alkyl)-amido-dodecanoyl)]-4-hydroxyprolinol |
| | [Hyp-(GalNAc-alkyl)₃] |
| | [chemical structure] |
| (Agn) | Adenosine-glycol nucleic acid (GNA) |
| (Cgn) | Cytidine-glycol nucleic acid (GNA) |
| (Ggn) | Guanosine-glycol nucleic acid (GNA) |
| (Tgn) | Thymidine-glycol nucleic acid (GNA) S-Isomer |
| P | Phosphate |
| VP | Vinyl-phosphonate (e.g., 5′-E-vinylphosphonate) |
| dA | 2′-deoxyadenosine-3′-phosphate |
| dAs | 2′-deoxyadenosine-3-phosphorothioate |
| dC | 2′-deoxycytidine-3-phosphate |
| dCs | 2′-deoxycytidine-3′-phosphorothioate |
| dG | 2′-deoxyguanosine-3′-phosphate |
| dGs | 2′-deoxyguanosine-3′-phosphorothioate |
| dT | 2′-deoxythymidine-3′-phosphate |
| dTs | 2′-deoxythymidine-3′-phosphorothioate |
| dU | 2′-deoxyuridine |
| dUs | 2′-deoxyuridine-3-phosphorothioate |
| (Ahd) | 2′-O-hexadecyl-adenosine-3′-phosphate |
| (Ahds) | 2′-O-hexadecyl-adenosine-3′-phosphorothioate |
| (Chd) | 2′-O-hexadecyl-cytidine-3′-phosphate |
| (Chds) | 2′-O-hexadecyl-cytidine-3′-phosphorothioate |
| (Ghd) | 2′-O-hexadecyl-guanosine-3′-phosphate |
| (Ghds) | 2′-O-hexadecyl-guanosine-3′-phosphorothioate |
| (Uhd) | 2′-O-hexadecyl-uridine-3′-phosphate |
| (Uhds) | 2′-O-hexadecyl-uridine-3′-phosphorothioate |

*It will be understood that these monomers, when present in an oligonucleotide, are mutually linked by 5′-3′-phosphodiester bonds; and it is understood that when the nucleotide contains a 2′-fluoro modification, then the fluoro replaces the hydroxy at that position of the parent nucleotide (i.e., it is a 2′-deoxy-2′-fluoronucleotide.

[0434] Some exemplary dsRNA molecule designs according to embodiments of the disclosure are shown schematically in FIGS. 5A and 5B. Exemplary dsRNA molecules according to some embodiments of the disclosure are listed in Table 5 and 6.

TABLE 5
Exemplary dsRNA molecule according to some embodiments of the disclosure

| | | | SEQ | | SEQ |
|---|---|---|---|---|---|
| Duplex | | | ID | | ID |
| ID | Target | Sense sequence (5′→3′) | NO | Antisense sequence (5′→3′) | NO: |
| AD- | Marc1 | asasaaaugu UfCfUfcaaaaaugaaL96 | 1101 | usdTscadTudTuugadGaAfcauuuuusasa | 1269 |
| 1636769 | | | | | |
| AD- | Marc1 | asasaaucacCfAfCfucuuugggcaL96 | 1102 | usdGsccdCadAagagdTgGfugauuuuscsc | 1270 |
| 1636805 | | | | | |
| AD- | Marc1 | asasagugggAfGfAfcccuguguaaL96 | 1103 | usdTsacdAcdAgggudCuCfccacuuusgsa | 1271 |
| 1636782 | | | | | |
| AD- | PNPLA3 | asasaugaaaGfAfCfaaagguggauL96 | 1104 | asdTsccdAcdCuuugdTcUfuucauuuscsu | 1272 |
| 1636754 | | | | | |
| AD- | C3 | asasaugaggGfUfUfucacagucaaL96 | 1105 | usdTsgadCudGugaadAcCfcucauuususc | 1273 |
| 1636695 | | | | | |
| AD- | PNPLA3 | asascuugcuAfCfCfcauuaggauaL96 | 1106 | usdAsucdCudAauggdGuAfgcaaguusgsc | 1274 |
| 1636733 | | | | | |
| AD- | Marc1 | asasucaccaCfUfCfuuugggcaguL96 | 1107 | asdCsugdCcdCaaagdAgUfggugauususu | 1275 |
| 1636798 | | | | | |
| AD- | C3 | ascsaugggcCfAfGfuggaagaucaL96 | 1108 | usdGsaudCudTccacdTgGfcccaugususg | 1276 |
| 1636720 | | | | | |
| AD- | C3 | ascscaggaaCfUfGfaaccuugauaL96 | 1109 | usdAsucdAadGguucdAgUfuccuggusgsg | 1277 |
| 1636701 | | | | | |
| AD- | C3 | ascscaggauGfCfCfacuaugucuaL96 | 1110 | usdAsgadCadTagugdGcAfuccugguscsu | 1278 |
| 1636716 | | | | | |
| AD- | PNPLA3 | ascscuaacuAfAfAfauaauguuuaL96 | 1111 | usdAsaadCadTuauudTuAfguuaggusgsa | 1279 |
| 1636729 | | | | | |
| AD- | Marc1 | ascscucgccUfGfGfuccugauuuaL96 | 1112 | usdAsaadTcdAggacdCaGfgcgaggususc | 1280 |
| 1636806 | | | | | |
| AD- | PNPLA3 | ascscuguugAfAfUfuuuguauuauL96 | 1113 | asdTsaadTadCaaaadTuCfaacaggusasa | 1281 |
| 1636735 | | | | | |
| AD- | C3 | ascsuacaugAfAfCfcuacagagauL96 | 1114 | asdTscudCudGuaggdTuCfauguagususg | 1282 |
| 1636714 | | | | | |
| AD- | Marc1 | ascsugauuaUfGfGfaauaguucuuL96 | 1115 | asdAsgadAcdTauucdCaUfaaucagususa | 1283 |
| 1636778 | | | | | |
| AD- | C3 | asgsaaauucUfAfCfuacaucuauuL96 | 1116 | asdAsuadGadTguagdTaGfaauuucuscsu | 1284 |
| 1479350 | | | | | |
| AD- | Marc1 | asgsacaggaUfUfCfugaaaacucaL96 | 1117 | usdGsagdTudTucagdAaUfccugucususg | 1285 |
| 1636785 | | | | | |
| AD- | C3 | asgsagcgggUfAfCfcucuucaucaL96 | 1118 | usdGsaudGadAgaggdTaCfccgcucusgsc | 1286 |
| 1636763 | | | | | |
| AD- | SCN9A | asgscaaaggUfCfAfcaauuuccuaL96 | 1119 | usdAsggdAadAuugudGaCfcuuugcuscsa | 1287 |
| 1636834 | | | | | |
| AD- | SCN9A | asgscauaaaUfGfUfuuucgaaauaL96 | 1120 | usdAsuudTcdGaaaadCaUfuuaugcususc | 1288 |
| 1636811 | | | | | |
| AD- | PNPLA3 | asgscaugagGfUfUfcuuagaauguL96 | 1121 | asdCsaudTcdTaagadAcCfucaugcusgsg | 1289 |
| 1636757 | | | | | |
| AD- | PNPLA3 | asgsgaagcaAfCfCfuuucgccuguL96 | 1122 | asdCsagdGcdGaaagdGuUfgcuuccusasg | 1290 |
| 1636758 | | | | | |
| AD- | Marc1 | asgsgaccagAfUfUfgcuuacucaaL96 | 1123 | usdTsgadGudAagcadAuCfugguccususg | 1291 |
| 1636791 | | | | | |
| AD- | Marc1 | asgsgagaagAfAfAfagugauucaaL96 | 1124 | usdTsgadAudCacuudTuCfuucuccuscsc | 1292 |
| 1636777 | | | | | |
| AD- | SCN9A | asgsucuucaAfGfUfuggcaaaauaL96 | 1125 | usdAsuudTudGccaadCuUfgaagacuscsg | 1293 |
| 1636838 | | | | | |
| AD- | C3 | asgsuggacuAfUfGfuguacaagauL96 | 1126 | asdTscudTgdTacacdAuAfguccacuscsc | 1294 |
| 1636703 | | | | | |
| AD- | SCN9A | asgsuuccuaUfCfUfccuuucagaaL96 | 1127 | usdTscudGadAaggadGaUfaggaacusasc | 1295 |
| 1636831 | | | | | |
| AD- | PNPLA3 | asusaaugucUfUfAfuguaaugcuuL96 | 1128 | asdAsgcdAudTacaudAaGfacauuauscsc | 1296 |
| 1636732 | | | | | |
| AD- | PNPLA3 | asusacaugaGfCfAfagauuugcaaL96 | 1129 | usdTsgcdAadAucuudGcUfcauguauscsc | 1297 |
| 1636737 | | | | | |
| AD- | Marc1 | asuscaaccaGfGfAfgggaaacauaL96 | 1130 | usdAsugdTudTcccudCcUfgguugauscsa | 1298 |
| 1636779 | | | | | |
| AD- | SCN9A | asuscaucuuUfGfGfgucauucuuuL96 | 1131 | asdAsagdAadTgaccdCaAfagaugausasa | 1299 |
| 1636843 | | | | | |
| AD- | Marc1 | asuscugaugAfAfGfuauauuuuuuL96 | 1132 | asdAsaadAadTauacdTuCfaucagauscsu | 1300 |
| 1636772 | | | | | |
| AD- | SCN9A | asuscuucuuUfGfUfcguagugauuL96 | 1133 | asdAsucdAcdTacgadCaAfagaagauscsa | 1301 |
| 1636836 | | | | | |
| AD- | SCN9A | asusgcugagAfAfAfuugucgaaaaL96 | 1134 | usdTsuudCgdAcaaudTuCfucagcauscsu | 1302 |
| 1636813 | | | | | |
| AD- | Marc1 | asusggcuugUfUfCfcagaugcauuL96 | 1135 | asdAsugdCadTcuggdAaCfaagccauscsa | 1303 |
| 1636783 | | | | | |
| AD- | C3 | asusguaccaUfGfCfuaaggccaaaL96 | 1136 | usdTsugdGcdCuuagdCaUfgguacaususg | 1304 |
| 1636692 | | | | | |
| AD- | SCN9A | asusgucgagUfAfCfacuuuuacuuL96 | 1137 | asdAsgudAadAagugdTaCfucgacaususu | 1305 |
| 1636844 | | | | | |
| AD- | PNPLA3 | asusguuaguAfGfAfauaagccuuaL96 | 1138 | usdAsagdGcdTuauudCuAfcuaacauscsu | 1306 |
| 1636726 | | | | | |
| AD- | PNPLA3 | asusuaggauAfAfUfgucuuauguaL96 | 1139 | usdAscadTadAgacadTuAfuccuaausgsg | 1307 |
| 1636760 | | | | | |
| AD- | SCN9A | asusucucuuCfGfUfucacagaugaL96 | 1140 | usdCsaudCudGugaadCgAfagagaauscsc | 1308 |
| 1636841 | | | | | |
| AD- | Marc1 | csasacacuuGfAfAfgcaugguguuL96 | 1141 | asdAscadCcdAugcudTcAfaguguugsusc | 1309 |
| 1636789 | | | | | |
| AD- | PNPLA3 | csasagauuuGfCfAfacuugcuacaL96 | 1142 | usdGsuadGcdAaguudGcAfaaucuugscsu | 1310 |
| 1636762 | | | | | |
| AD- | C3 | csasaggucuAfCfGfccuauuacauL96 | 1143 | asdTsgudAadTaggcdGuAfgaccuugsasc | 1311 |
| 1636766 | | | | | |
| AD- | C3 | csascccucaUfCfAfucuaccuggaL96 | 1144 | usdCscadGgdTagaudGaUfgagggugsusu | 1312 |
| 1636718 | | | | | |
| AD- | C3 | csasccguauCfCfAfcugggaaucuL96 | 1145 | asdGsaudTcdCcagudGgAfuacggugsgsg | 1313 |
| 1636707 | | | | | |
| AD- | PNPLA3 | csasccuuuuUfCfAfccuaacuaaaL96 | 1146 | usdTsuadGudTaggudGaAfaaaggugsusu | 1314 |
| 1636727 | | | | | |
| AD- | PNPLA3 | csasccuuuuUfCfAfccuaacuaauL96 | 1147 | asdTsuadGudTaggudGaAfaaaggugsusu | 1315 |
| 1636741 | | | | | |
| AD- | SCN9A | csascuccuuCfCfUfgauuguguuuL96 | 1148 | asdAsacdAcdAaucadGgAfaggagugsgsa | 1316 |
| 1636830 | | | | | |
| AD- | Marc1 | csasgaacgaAfAfGfuuauauggaaL96 | 1149 | usdTsccdAudAuaacdTuUfcguucugsasa | 1317 |
| 1636780 | | | | | |
| AD- | C3 | csasgagaaaUfUfCfuacuacaucuL96 | 1150 | asdGsaudGudAguagdAaUfuucucugsusa | 1318 |
| 1636689 | | | | | |
| AD- | SCN9A | csasugaacgAfCfUfucuuccacuuL96 | 1151 | asdAsgudGgdAagaadGuCfguucaugsusg | 1319 |
| 1636839 | | | | | |
| AD- | PNPLA3 | csasugagcaAfGfAfuuugcaacuuL96 | 1152 | asdAsgudTgdCaaaudCuUfgcucaugsusa | 1320 |
| 1636753 | | | | | |
| AD- | Marc1 | csasugguguUfUfCfagaacugagaL96 | 1153 | usdCsucdAgdTucugdAaAfcaccaugscsu | 1321 |
| 1636792 | | | | | |
| AD- | C3 | csasuugagaAfCfCfcggaaggcauL96 | 1154 | asdTsgcdCudTccggdGuUfcucaaugsusu | 1322 |
| 1636709 | | | | | |
| AD- | C3 | cscsacagccAfAfAfgauaagaacuL96 | 1155 | asdGsuudCudTaucudTuGfgcuguggsusc | 1323 |
| 1636721 | | | | | |
| AD- | C3 | cscsagauccAfCfUfucaccaagauL96 | 1156 | asdTscudTgdGugaadGuGfgaucuggsusa | 1324 |
| 1636719 | | | | | |
| AD- | PNPLA3 | cscsauuaggAfUfAfaugucuuauuL96 | 1157 | asdAsuadAgdAcauudAuCfcuaauggsgsu | 1325 |
| 1636765 | | | | | |
| AD- | C3 | cscscgucguGfCfGfuuggcucaauL96 | 1158 | asdTsugdAgdCcaacdGcAfcgacgggsasg | 1326 |
| 1636693 | | | | | |
| AD | Marc1 | cscsgacccaAfGfGfaccagauuguL96 | 1159 | asdCsaadTcdTggucdCuUfgggucggsasa | 1327 |
| 1636807 | | | | | |
| AD- | C3 | cscsgagccgUfUfCfucuacaauuuL96 | 1160 | asdAsaudTgdTagagdAaCfggcucggsasu | 1328 |
| 1479283 | | | | | |
| AD- | Marc1 | cscsguauguCfCfUfggaauauuauL96 | 1161 | asdTsaadTadTuccadGgAfcauacggsusu | 1329 |
| 1636774 | | | | | |
| AD- | PNPLA3 | cscsuaacuaAfAfAfuaauguuuaaL96 | 1162 | usdTsaadAcdAuuaudTuUfaguuaggsusg | 1330 |
| 1636725 | | | | | |
| AD- | C3 | cscsuugucuUfCfUfcagaaccagaL96 | 1163 | usdCsugdGudTcugadGaAfgacaaggsasg | 1331 |
| 1636715 | | | | | |
| AD- | PNPLA3 | csgsacaucuGfCfCfcuaaagucaaL96 | 1164 | usdTsgadCudTuaggdGcAfgaugucgsusa | 1332 |
| 1636750 | | | | | |
| AD- | C3 | csgsugcguuGfGfCfucaaugaacuL96 | 1165 | asdGsuudCadTugagdCcAfacgcacgsasc | 1333 |
| 1636702 | | | | | |
| AD- | C3 | csusacccuaCfUfCfuguuguucgaL96 | 1166 | usdCsgadAcdAacagdAgUfaggguagscsc | 1334 |
| 1636705 | | | | | |
| AD- | C3 | csusacugcaGfCfUfaaaagacuuuL96 | 1167 | asdAsagdTcdTuuuadGcUfgcaguagsgsg | 1335 |
| 1636690 | | | | | |
| AD- | C3 | csusagugcuGfUfCfcagugagaaaL96 | 1168 | usdTsucdTcdAcuggdAcAfgcacuagsusu | 1336 |
| 1636694 | | | | | |
| AD- | PNPLA3 | csusauuaauGfGfUfcagacuguuaL96 | 1169 | usdAsacdAgdTcugadCcAfuuaauagsgsg | 1337 |
| 1636743 | | | | | |
| AD | PNPLA3 | csusccauggCfGfGfggguaacaaaL96 | 1170 | usdTsugdTudAccccdCgCfcauggagsasc | 1338 |
| 1636756 | | | | | |
| AD- | PNPLA3 | csusgaguugGfUfUfuuaugaaaauL96 | 1171 | asdTsuudTcdAuaaadAcCfaacucagscsu | 1339 |
| 1636734 | | | | | |
| AD- | SCN9A | csusgcccaaAfAfUfacugauaauaL96 | 1172 | usdAsuudAudCaguadTuUfugggcagscsa | 1340 |
| 1636840 | | | | | |
| AD- | C3 | csusgggaggAfCfCfcugguaagcaL96 | 1173 | usdGscudTadCcaggdGuCfcucccagscsg | 1341 |
| 1636712 | | | | | |
| AD- | Marc1 | csusguggagGfAfGfaagaaaaguaL96 | 1174 | usdAscudTudTcuucdTcCfuccacagsasa | 1342 |
| 1636800 | | | | | |
| AD- | Marc1 | csusucuuauUfGfGfugacguggaaL96 | 1175 | usdTsccdAcdGucacdCaAfuaagaagscsu | 1343 |
| 1636790 | | | | | |
| AD- | Marc1 | csusuguuccAfGfAfugcauuuuaaL96 | 1176 | usdTsaadAadTgcaudCuGfgaacaagscsc | 1344 |
| 1636770 | | | | | |
| AD- | SCN9A | csusuugucgUfAfGfugauuuuccuL96 | 1177 | asdGsgadAadAucacdTaCfgacaaagsasa | 1345 |
| 1636837 | | | | | |
| AD- | C3 | gsascagacaAfGfAfccaucuacauL96 | 1178 | asdTsgudAgdAuggudCuUfgucugucsusg | 1346 |
| 1636699 | | | | | |
| AD- | C3 | gsasgaaauuCfUfAfcuacaucuauL96 | 1179 | asdTsagdAudGuagudAgAfauuucucsusg | 1347 |
| 1479341 | | | | | |
| AD- | C3 | gsasgaaccaGfAfAfacaaugccauL96 | 1180 | asdTsggdCadTuguudTcUfgguucucsusu | 1348 |
| 1636691 | | | | | |
| AD- | SCN9A | gsasggucaaGfAfCfaucuuuaugaL96 | 1181 | usdCsaudAadAgaugdTcUfugaccucscsa | 1349 |
| 1636815 | | | | | |
| AD- | Marc1 | gsasgugcucCfUfUfcuccaguucuL96 | 1182 | asdGsaadCudGgagadAgGfagcacucscsg | 1350 |
| 1636795 | | | | | |
| AD- | PNPLA3 | gsasuuugcaAfCfUfugcuacccauL96 | 1183 | asdTsggdGudAgcaadGuUfgcaaaucsusu | 1351 |
| 1636731 | | | | | |
| AD- | PNPLA3 | gscsacagggAfAfCfcucuaccuuaL96 | 1184 | usdAsagdGudAgaggdTuCfccugugcsasg | 1352 |
| 1636744 | | | | | |
| AD- | C3 | gscsaggcagAfGfCfgcagcgggauL96 | 1185 | asdTsccdCgdCugcgdCuCfugccugcsasc | 1353 |
| 1636717 | | | | | |
| AD- | Marc1 | gscscauuccCfCfUfcagcuaaugaL96 | 1186 | usdCsaudTadGcugadGgGfgaauggcsasa | 1354 |
| 1636796 | | | | | |
| AD- | C3 | gscscucuucUfUfAfacaaauuucuL96 | 1187 | asdGsaadAudTuguudAaGfaagaggcscsc | 1355 |
| 1636710 | | | | | |
| AD- | SCN9A | gscsguuguaGfUfUfccuaucuccuL96 | 1188 | asdGsgadGadTaggadAcUfacaacgcscsu | 1356 |
| 1636822 | | | | | |
| AD- | SCN9A | gscsucaucaUfGfUfgcacuauucuL96 | 1189 | asdGsaadTadGugcadCaUfgaugagcsasu | 1357 |
| 1636828 | | | | | |
| AD- | C3 | gscsugaggaGfAfAfuugcuucauuL96 | 1190 | asdAsugdAadGcaaudTcUfccucagcsasc | 1358 |
| 1636767 | | | | | |
| AD- | PNPLA3 | gscsugaguuGfGfUfuuuaugaaaaL96 | 1191 | usdTsuudCadTaaaadCcAfacucagcsusc | 1359 |
| 1636739 | | | | | |
| AD- | Marc1 | gscsuucucaGfAfCfagcauuggauL96 | 1192 | asdTsccdAadTgcugdTcUfgagaagcsasg | 1360 |
| 1636803 | | | | | |
| AD- | Marc1 | gsgsaccagaUfUfGfcuuacucagaL96 | 1193 | usdCsugdAgdTaagcdAaUfcugguccsusu | 1361 |
| 1636801 | | | | | |
| AD- | C3 | gsgsagguugUfGfCfugagccggaaL96 | 1194 | usdTsccdGgdCucagdCaCfaaccuccscsc | 1362 |
| 1636713 | | | | | |
| AD- | SCN9A | gsgscacaugAfAfCfgacuucuucaL96 | 1195 | usdGsaadGadAgucgdTuCfaugugccsasc | 1363 |
| 1636833 | | | | | |
| AD- | PNPLA3 | gsgsccuuauCfCfCfuccuuccuuaL96 | 1196 | usdAsagdGadAggagdGgAfuaaggccsasc | 1364 |
| 1636740 | | | | | |
| AD- | SCN9A | gsgscuggauUfUfCfcuaauuguuuL96 | 1197 | asdAsacdAadTuaggdAaAfuccagccsasa | 1365 |
| 1636823 | | | | | |
| AD- | SCN9A | gsgsgaaaacAfAfUfcuuccguuuaL96 | 1198 | usdAsaadCgdGaagadTuGfuuuucccsusu | 1366 |
| 1636827 | | | | | |
| AD- | PNPLA3 | gsgsgguaacAfAfGfaugauaaucuL96 | 1199 | asdGsaudTadTcaucdTuGfuuaccccscsg | 1367 |
| 1636749 | | | | | |
| AD- | Marc1 | gsgsugucucAfAfUfgcuucaauguL96 | 1200 | asdCsaudTgdAagcadTuGfagacaccsasg | 1368 |
| 1636799 | | | | | |
| AD- | C3 | gsusaaugcaGfGfAfcuucuucauuL96 | 1201 | asdAsugdAadGaagudCcUfgcauuacsusg | 1369 |
| 1636700 | | | | | |
| AD- | C3 | gsusaccucuUfCfAfuccagacaguL96 | 1202 | asdCsugdTcdTggaudGaAfgagguacscsc | 1370 |
| 1636706 | | | | | |
| AD- | Marc1 | gsusauaacuCfUfAfagaucugauuL96 | 1203 | asdAsucdAgdAucuudAgAfguuauacsasa | 1371 |
| 1636771 | | | | | |
| AD- | SCN9A | gsusccucuaAfGfAfagaauaucuaL96 | 1204 | usdAsgadTadTucuudCuUfagaggacsusg | 1372 |
| 1636826 | | | | | |
| AD- | Marc1 | gsusgacccuUfCfAfgaacgaaaguL96 | 1205 | asdCsuudTcdGuucudGaAfgggucacsasc | 1373 |
| 1636848 | | | | | |
| AD- | PNPLA3 | gsusgagugaCfAfAfcguacccuuaL96 | 1206 | usdAsagdGgdTacgudTgUfcacucacsusc | 1374 |
| 1636746 | | | | | |
| AD- | PNPLA3 | gsusgcuaaaGfUfUfucccaucuuuL96 | 1207 | asdAsagdAudGggaadAcUfuuagcacscsu | 1375 |
| 1636747 | | | | | |
| AD- | C3 | gsusgggagaAfGfUfucggccuagaL96 | 1208 | usdCsuadGgdCcgaadCuUfcucccacsusg | 1376 |
| 1636723 | | | | | |
| AD- | Marc1 | usasacucuaAfGfAfucugaugaauL96 | 1209 | asdTsucdAudCagaudCuUfagaguuasusa | 1377 |
| 1636847 | | | | | |
| AD- | SCN9A | usascaugauCfUfUfcuuugucguaL96 | 1210 | usdAscgdAcdAaagadAgAfucauguasgsg | 1378 |
| 1636824 | | | | | |
| AD- | PNPLA3 | usasccuguuGfAfAfuuuuguauuaL96 | 1211 | usdAsaudAcdAaaaudTcAfacagguasasc | 1379 |
| 1636748 | | | | | |
| AD- | C3 | usascgugcuGfCfCfcaguuucgaaL96 | 1212 | usdTscgdAadAcuggdGcAfgcacguascsu | 1380 |
| 1636704 | | | | | |
| AD- | PNPLA3 | usasggauaaUfGfUfcuuauguaauL96 | 1213 | asdTsuadCadTaagadCaUfuauccuasasu | 1381 |
| 1636724 | | | | | |
| AD- | SCN9A | usasugccaaAfAfUfccuuuuuauaL96 | 1214 | usdAsuadAadAaggadTuUfuggcauasgsa | 1382 |
| 1636832 | | | | | |
| AD- | SCN9A | usasugugaaAfCfAfaaccuuacgaL96 | 1215 | usdCsgudAadGguuudGuUfucacauasasu | 1383 |
| 1636835 | | | | | |
| AD- | Marc1 | usasuuguaaUfUfUfcaggaugcgaL96 | 1216 | usdCsgcdAudCcugadAaUfuacaauasusu | 1384 |
| 1636788 | | | | | |
| AD- | Marc1 | uscsaaugcuUfCfAfaugucccaguL96 | 1217 | asdCsugdGgdAcauudGaAfgcauugasgsa | 1385 |
| 1636787 | | | | | |
| AD- | PNPLA3 | uscsacuugaGfGfAfggcgagucuaL96 | 1218 | usdAsgadCudCgccudCcUfcaagugascsu | 1386 |
| 1636761 | | | | | |
| AD- | Marc1 | uscsagaacgAfAfAfguuauauggaL96 | 1219 | usdCscadTadTaacudTuCfguucugasasg | 1387 |
| 1636794 | | | | | |
| AD- | Marc1 | uscsaggaugCfGfAfugucuaugcaL96 | 1220 | usdGscadTadGacaudCgCfauccugasasa | 1388 |
| 1636804 | | | | | |
| AD- | Marc1 | uscscauagaUfCfUfggaucuggcaL96 | 1221 | usdGsccdAgdAuccadGaUfcuauggasasa | 1389 |
| 1636802 | | | | | |
| AD- | SCN9A | uscscauuguCfUfUfgacaucuuauL96 | 1222 | asdTsaadGadTgucadAgAfcaauggasusc | 1390 |
| 1636814 | | | | | |
| AD- | SCN9A | uscscucuaaGfAfAfgaauaucuauL96 | 1223 | asdTsagdAudAuucudTcUfuagaggascsu | 1391 |
| 1636812 | | | | | |
| AD- | SCN9A | uscscugcaaGfUfCfaaguuccaaaL96 | 1224 | usdTsugdGadAcuugdAcUfugcaggasasa | 1392 |
| 1636850 | | | | | |
| AD- | PNPLA3 | uscsugagcuGfAfGfuugguuuuauL96 | 1225 | asdTsaadAadCcaacdTcAfgcucagasgsg | 1393 |
| 1636738 | | | | | |
| AD- | Marc1 | usgsacccuuCfAfGfaacgaaaguuL96 | 1226 | asdAscudTudCguucdTgAfagggucascsa | 1394 |
| 1636797 | | | | | |
| AD- | PNPLA3 | usgsagugaaGfAfAfaugaaagacaL96 | 1227 | usdGsucdTudTcauudTcUfucacucasgsu | 1395 |
| 1636728 | | | | | |
| AD- | SCN9A | usgsauaguuAfCfCfuaguuugcaaL96 | 1228 | usdTsgcdAadAcuagdGuAfacuaucasasa | 1396 |
| 1636842 | | | | | |
| AD- | SCN9A | usgscagacaAfGfAfucuucacuuaL96 | 1229 | usdAsagdTgdAagaudCuUfgucugcasusa | 1397 |
| 1636852 | | | | | |
| AD- | PNPLA3 | usgsccaaaaCfAfAfccaucaccguL96 | 1230 | asdCsggdTgdAuggudTgUfuuuggcasusc | 1398 |
| 1636764 | | | | | |
| AD- | C3 | usgscgaucaGfAfAfgagaccaaguL96 | 1231 | asdCsuudGgdTcucudTcUfgaucgcasgsg | 1399 |
| 1636698 | | | | | |
| AD- | C3 | usgscuaaggCfCfAfaagaucaacuL96 | 1232 | asdGsuudGadTcuuudGgCfcuuagcasusg | 1400 |
| 1636697 | | | | | |
| AD- | SCN9A | usgscucuccAfUfAfuuggauaaaaL96 | 1233 | usdTsuudAudCcaaudAuGfgagagcasasu | 1401 |
| 1636816 | | | | | |
| AD- | SCN9A | usgscucuccUfUfUfgugguuucauL96 | 1234 | asdTsgadAadCcacadAaGfgagagcasusc | 1402 |
| 1636846 | | | | | |
| AD- | C3 | usgsgacuauGfUfGfuacaagaccuL96 | 1235 | asdGsgudCudTguacdAcAfuaguccascsu | 1403 |
| 1636711 | | | | | |
| AD- | Marc1 | usgsgaggagAfAfGfaaaagugauuL96 | 1236 | asdAsucdAcdTuuucdTuCfuccuccascsa | 1404 |
| 1636793 | | | | | |
| AD- | PNPLA3 | usgsgauacaUfGfAfgcaagauuuaL96 | 1237 | usdAsaadTcdTugcudCaUfguauccascsc | 1405 |
| 1636742 | | | | | |
| AD- | PNPLA3 | usgsggagagAfUfAfugccuucgaaL96 | 1238 | usdTscgdAadGgcaudAuCfucucccasgsc | 1406 |
| 1636755 | | | | | |
| AD- | C3 | usgsggcaacUfCfCfaacaauuacuL96 | 1239 | asdGsuadAudTguugdGaGfuugcccascsg | 1407 |
| 1636696 | | | | | |
| AD- | SCN9A | usgsggucauUfCfUfucacuuugaaL96 | 1240 | usdTscadAadGugaadGaAfugacccasasa | 1408 |
| 1636821 | | | | | |
| AD- | SCN9A | usgsgucuuuAfCfUfggaaucuuuuL96 | 1241 | asdAsaadGadTuccadGuAfaagaccasasa | 1409 |
| 1636851 | | | | | |
| AD- | PNPLA3 | usgsgugacaUfGfGfcuuccagauaL96 | 1242 | usdAsucdTgdGaagcdCaUfgucaccasgsu | 1410 |
| 1636751 | | | | | |
| AD- | SCN9A | usgsgugucaUfCfAfuagauaauuuL96 | 1243 | asdAsaudTadTcuaudGaUfgacaccasasu | 1411 |
| 1636818 | | | | | |
| AD- | Marc1 | usgsgugucuCfAfAfugcuucaauaL96 | 1244 | usdAsuudGadAgcaudTgAfgacaccasgsa | 1412 |
| 1636781 | | | | | |
| AD- | C3 | usgsuacaagAfCfCfcgacuggucaL96 | 1245 | usdGsacdCadGucggdGuCfuuguacascsa | 1413 |
| 1636722 | | | | | |
| AD- | SCN9A | usgsuaggagAfAfUfucacuuuucaL96 | 1246 | usdGsaadAadGugaadTuCfuccuacascsa | 1414 |
| 1636820 | | | | | |
| AD- | SCN9A | usgsuaggagAfAfUfucacuuuucuL96 | 1247 | asdGsaadAadGugaadTuCfuccuacascsa | 1415 |
| 1636817 | | | | | |
| AD- | SCN9A | usgsucgaguAfCfAfcuuuuacugaL96 | 1248 | usdCsagdTadAaagudGuAfcucgacasusu | 1416 |
| 1636825 | | | | | |
| AD- | C3 | usgsuucgugCfUfGfaauaagaaguL96 | 1249 | asdCsuudCudTauucdAgCfacgaacascsg | 1417 |
| 1636708 | | | | | |
| AD- | SCN9A | usgsuucuguCfUfGfaguguguuuaL96 | 1250 | usdAsaadCadCacucdAgAfcagaacascsa | 1418 |
| 1636819 | | | | | |
| AD- | Marc1 | usgsuuuaaaAfCfCfcaauaucuauL96 | 1251 | asdTsagdAudAuuggdGuUfuuaaacasasc | 1419 |
| 1636775 | | | | | |
| AD- | Marc1 | ususaaaacuGfUfGfaauaaauggaL96 | 1252 | usdCscadTudTauucdAcAfguuuuaasasa | 1420 |
| 1636784 | | | | | |
| AD- | SCN9A | ususaccuauCfUfCfugcuucaaguL96 | 1253 | asdCsuudGadAgcagdAgAfuagguaascsc | 1421 |
| 1636829 | | | | | |
| AD- | PNPLA3 | ususaccuguUfGfAfauuuuguauuL96 | 1254 | asdAsuadCadAaauudCaAfcagguaascsa | 1422 |
| 1636768 | | | | | |
| AD- | PNPLA3 | ususauguaaUfGfCfugcccuguaaL96 | 1255 | usdTsacdAgdGgcagdCaUfuacauaasgsa | 1423 |
| 1636745 | | | | | |
| AD- | SCN9A | ususccucaaGfGfAfaaaagauaaaL96 | 1256 | usdTsuadTcdTuuuudCcUfugaggaasasu | 1424 |
| 1636809 | | | | | |
| AD- | C3 | ususcgugcuGfAfAfuaagaagaauL96 | 1257 | asdTsucdTudCuuaudTcAfgcacgaascsa | 1425 |
| 1636688 | | | | | |
| AD- | Marc1 | ususgccauuUfUfGfuccuuugauuL96 | 1258 | asdAsucdAadAggacdAaAfauggcaasusa | 1426 |
| 1636773 | | | | | |
| AD- | PNPLA3 | ususgcuaccCfAfUfuaggauaauaL96 | 1259 | usdAsuudAudCcuaadTgGfguagcaasgsu | 1427 |
| 1636752 | | | | | |
| AD- | PNPLA3 | ususgguuuuAfUfGfaaaagcuagaL96 | 1260 | usdCsuadGcdTuuucdAuAfaaaccaascsu | 1428 |
| 1636759 | | | | | |
| AD- | Marc1 | ususguaauuUfCfAfggaugcgauaL96 | 1261 | usdAsucdGcdAuccudGaAfauuacaasusa | 1429 |
| 1636849 | | | | | |
| AD- | Marc1 | ususguuccaGfAfUfgcauuuuaauL96 | 1262 | asdTsuadAadAugcadTcUfggaacaasgsc | 1430 |
| 1636776 | | | | | |
| AD- | SCN9A | ususuaguacAfCfUfccuuauucauL96 | 1263 | asdTsgadAudAaggadGuGfuacuaaasasu | 1431 |
| 1636845 | | | | | |
| AD- | SCN9A | ususuaucauCfUfUfugggucauuaL96 | 1264 | usdAsaudGadCccaadAgAfugauaaasgsa | 1432 |
| 1636810 | | | | | |
| AD- | Marc1 | ususuccauaGfAfUfcuggaucugaL96 | 1265 | usdCsagdAudCcagadTcUfauggaaasasu | 1433 |
| 1636786 | | | | | |
| AD- | SCN9A | ususuguagaUfCfUfugcaauuacaL96 | 1266 | usdGsuadAudTgcaadGaUfcuacaaasasg | 1434 |
| 1636808 | | | | | |
| AD- | PNPLA3 | ususuuagaaCfAfCfcuuuuucacuL96 | 1267 | asdGsugdAadAaaggdTgUfucuaaaasusu | 1435 |
| 1636736 | | | | | |
| AD- | PNPLA3 | ususuuucacCfUfAfacuaaaauaaL96 | 1268 | usdTsaudTudTaguudAgGfugaaaaasgsg | 1436 |
| 1636730 | | | | | |

TABLE 6
More Exemplary dsRNA molecule according to some embodiments of the disclosure

| | | | SEQ | | SEQ |
|---|---|---|---|---|---|
| Duplex | | | ID | | ID |
| ID | Target | Sense sequence (5′→3′) | NO: | Antisense sequence (5′→3′) | NO: |
| AD- | AGT | asgsccugagGfGfCfcaccauccuuL96 | 1437 | asdAsggdAudGguggdCcCfucaggcuscsa | 1786 |
| 1657992 | | | | | |
| AD- | AGT | cscsugagggCfCfAfccauccucuuL96 | 1438 | asdAsgadGgdAuggudGgCfccucaggscsu | 1787 |
| 1657994 | | | | | |
| AD- | AGT | asgsggccacCfAfUfccucugccuuL96 | 1439 | asdAsggdCadGaggadTgGfuggcccuscsa | 1788 |
| 1657998 | | | | | |
| AD- | AGT | gsusgaccggGfUfGfuacauacacuL96 | 1440 | asdGsugdTadTguacdAcCfcggucacscsu | 1789 |
| 1658030 | | | | | |
| AD- | AGT | cscsggguguAfCfAfuacaccccuuL96 | 1441 | asdAsggdGgdTguaudGuAfcacccggsusc | 1790 |
| 1684491 | | | | | |
| AD- | AGT | csgsgguguaCfAfUfacaccccuuuL96 | 1442 | asdAsagdGgdGuguadTgUfacacccgsgsu | 1791 |
| 1684493 | | | | | |
| AD- | AGT | gsgsguguacAfUfAfcaccccuucuL96 | 1443 | asdGsaadGgdGgugudAuGfuacacccsgsg | 1792 |
| 1684495 | | | | | |
| AD- | AGT | gsgsuguacaUfAfCfaccccuuccuL96 | 1444 | asdGsgadAgdGggugdTaUfguacaccscsg | 1793 |
| 1684497 | | | | | |
| AD- | AGT | gsusguacauAfCfAfccccuuccauL96 | 1445 | asdTsggdAadGgggudGuAfuguacacscsc | 1794 |
| 1684499 | | | | | |
| AD- | AGT | usgsuacauaCfAfCfcccuuccacuL96 | 1446 | asdGsugdGadAggggdTgUfauguacascsc | 1795 |
| 1684501 | | | | | |
| AD- | AGT | gsusacauacAfCfCfccuuccaccuL96 | 1447 | asdGsgudGgdAagggdGuGfuauguacsasc | 1796 |
| 1684503 | | | | | |
| AD- | AGT | usascauacaCfCfCfcuuccaccuuL96 | 1448 | asdAsggdTgdGaaggdGgUfguauguascsa | 1797 |
| 1684505 | | | | | |
| AD- | AGT | ascsauacacCfCfCfuuccaccucuL96 | 1449 | asdGsagdGudGgaagdGgGfuguaugusasc | 1798 |
| 1684507 | | | | | |
| AD- | AGT | csasuacaccCfCfUfuccaccucguL96 | 1450 | asdCsgadGgdTggaadGgGfguguaugsusa | 1799 |
| 1684509 | | | | | |
| AD- | AGT | asusacacccCfUfUfccaccucguuL96 | 1451 | asdAscgdAgdGuggadAgGfgguguausgsu | 1800 |
| 1684511 | | | | | |
| AD- | AGT | cscscuuccaCfCfUfcgucauccauL96 | 1452 | asdTsggdAudGacgadGgUfggaagggsgsu | 1801 |
| 1684513 | | | | | |
| AD- | AGT | cscsuuccacCfUfCfgucauccacuL96 | 1453 | asdGsugdGadTgacgdAgGfuggaaggsgsg | 1802 |
| 1684515 | | | | | |
| AD- | AGT | csusuccaccUfCfGfucauccacauL96 | 1454 | asdTsgudGgdAugacdGaGfguggaagsgsg | 1803 |
| 1658032 | | | | | |
| AD- | AGT | ususccaccuCfGfUfcauccacaauL96 | 1455 | asdTsugdTgdGaugadCgAfgguggaasgsg | 1804 |
| 1658033 | | | | | |
| AD- | AGT | uscscaccucGfUfCfauccacaauuL96 | 1456 | asdAsuudGudGgaugdAcGfagguggasasg | 1805 |
| 1658034 | | | | | |
| AD- | AGT | cscsaccucgUfCfAfuccacaauguL96 | 1457 | asdCsaudTgdTggaudGaCfgagguggsasa | 1806 |
| 1658035 | | | | | |
| AD- | AGT | csasccucguCfAfUfccacaaugauL96 | 1458 | asdTscadTudGuggadTgAfcgaggugsgsa | 1807 |
| 1658036 | | | | | |
| AD- | AGT | cscsucgucaUfCfCfacaaugagauL96 | 1459 | asdTscudCadTugugdGaUfgacgaggsusg | 1808 |
| 1658038 | | | | | |
| AD- | AGT | csuscgucauCfCfAfcaaugagaguL96 | 1460 | asdCsucdTcdAuugudGgAfugacgagsgsu | 1809 |
| 1658039 | | | | | |
| AD- | AGT | uscsgucaucCfAfCfaaugagaguuL96 | 1461 | asdAscudCudCauugdTgGfaugacgasgsg | 1810 |
| 1658040 | | | | | |
| AD- | AGT | csgsucauccAfCfAfaugagaguauL96 | 1462 | asdTsacdTcdTcauudGuGfgaugacgsasg | 1811 |
| 1658041 | | | | | |
| AD- | AGT | gsuscauccaCfAfAfugagaguacuL96 | 1463 | asdGsuadCudCucaudTgUfggaugacsgsa | 1812 |
| 1658042 | | | | | |
| AD- | AGT | uscsauccacAfAfUfgagaguaccuL96 | 1464 | asdGsgudAcdTcucadTuGfuggaugascsg | 1813 |
| 1658043 | | | | | |
| AD- | AGT | csasuccacaAfUfGfagaguaccuuL96 | 1465 | asdAsggdTadCucucdAuUfguggaugsasc | 1814 |
| 1658044 | | | | | |
| AD- | AGT | asusccacaaUfGfAfgaguaccuguL96 | 1466 | asdCsagdGudAcucudCaUfuguggausgsa | 1815 |
| 1658045 | | | | | |
| AD- | AGT | uscscacaauGfAfGfaguaccuguuL96 | 1467 | asdAscadGgdTacucdTcAfuuguggasusg | 1816 |
| 1658046 | | | | | |
| AD- | AGT | cscsacaaugAfGfAfguaccuguguL96 | 1468 | asdCsacdAgdGuacudCuCfauuguggsasu | 1817 |
| 1658047 | | | | | |
| AD- | AGT | csascaaugaGfAfGfuaccugugauL96 | 1469 | asdTscadCadGguacdTcUfcauugugsgsa | 1818 |
| 1658048 | | | | | |
| AD- | AGT | ascsaaugagAfGfUfaccugugaguL96 | 1470 | asdCsucdAcdAgguadCuCfucauugusgsg | 1819 |
| 1658049 | | | | | |
| AD- | AGT | csasaugagaGfUfAfccugugagcuL96 | 1471 | asdGscudCadCaggudAcUfcucauugsusg | 1820 |
| 1658050 | | | | | |
| AD- | AGT | asasugagagUfAfCfcugugagcauL96 | 1472 | asdTsgcdTcdAcaggdTaCfucucauusgsu | 1821 |
| 1658051 | | | | | |
| AD- | AGT | asusgagaguAfCfCfugugagcaguL96 | 1473 | asdCsugdCudCacagdGuAfcucucaususg | 1822 |
| 1658052 | | | | | |
| AD- | AGT | usgsagaguaCfCfUfgugagcagcuL96 | 1474 | asdGscudGcdTcacadGgUfacucucasusu | 1823 |
| 1658053 | | | | | |
| AD- | AGT | gsasgaguacCfUfGfugagcagcuuL96 | 1475 | asdAsgcdTgdCucacdAgGfuacucucsasu | 1824 |
| 1658054 | | | | | |
| AD- | AGT | asgsaguaccUfGfUfgagcagcuguL96 | 1476 | asdCsagdCudGcucadCaGfguacucuscsa | 1825 |
| 1658055 | | | | | |
| AD- | AGT | gsasguaccuGfUfGfagcagcugguL96 | 1477 | asdCscadGcdTgcucdAcAfgguacucsusc | 1826 |
| 1658056 | | | | | |
| AD- | AGT | asgsuaccugUfGfAfgcagcuggcuL96 | 1478 | asdGsccdAgdCugcudCaCfagguacuscsu | 1827 |
| 1658057 | | | | | |
| AD- | AGT | gsusaccuguGfAfGfcagcuggcauL96 | 1479 | asdTsgcdCadGcugcdTcAfcagguacsusc | 1828 |
| 1658058 | | | | | |
| AD- | AGT | usasccugugAfGfCfagcuggcaauL96 | 1480 | asdTsugdCcdAgcugdCuCfacagguascsu | 1829 |
| 1658059 | | | | | |
| AD- | AGT | asasuggucgGfGfAfugcuggccauL96 | 1481 | asdTsggdCcdAgcaudCcCfgaccauusgsc | 1830 |
| 1658184 | | | | | |
| AD- | AGT | asusggucggGfAfUfgcuggccaauL96 | 1482 | asdTsugdGcdCagcadTcCfcgaccaususg | 1831 |
| 1658185 | | | | | |
| AD- | AGT | usgsgucgggAfUfGfcuggccaacuL96 | 1483 | asdGsuudGgdCcagcdAuCfccgaccasusu | 1832 |
| 1658186 | | | | | |
| AD- | AGT | gsgsucgggaUfGfCfuggccaacuuL96 | 1484 | asdAsgudTgdGccagdCaUfcccgaccsasu | 1833 |
| 1658187 | | | | | |
| AD- | AGT | gsuscgggauGfCfUfggccaacuuuL96 | 1485 | asdAsagdTudGgccadGcAfucccgacscsa | 1834 |
| 1658188 | | | | | |
| AD- | AGT | uscsgggaugCfUfGfgccaacuucuL96 | 1486 | asdGsaadGudTggccdAgCfaucccgascsc | 1835 |
| 1658189 | | | | | |
| AD- | AGT | csgsggaugcUfGfGfccaacuucuuL96 | 1487 | asdAsgadAgdTuggcdCaGfcaucccgsasc | 1836 |
| 1658190 | | | | | |
| AD- | AGT | gsgsgaugcuGfGfCfcaacuucuuuL96 | 1488 | asdAsagdAadGuuggdCcAfgcaucccsgsa | 1837 |
| 1658191 | | | | | |
| AD- | AGT | gsgsaugcugGfCfCfaacuucuuguL96 | 1489 | asdCsaadGadAguugdGcCfagcauccscsg | 1838 |
| 1658192 | | | | | |
| AD- | AGT | gsasugcuggCfCfAfacuucuugguL96 | 1490 | asdCscadAgdAaguudGgCfcagcaucscsc | 1839 |
| 1658193 | | | | | |
| AD- | AGT | gscsuggccaAfCfUfucuugggcuuL96 | 1491 | asdAsgcdCcdAagaadGuUfggccagcsasu | 1840 |
| 1658196 | | | | | |
| AD- | AGT | csusggccaaCfUfUfcuugggcuuuL96 | 1492 | asdAsagdCcdCaagadAgUfuggccagscsa | 1841 |
| 1658197 | | | | | |
| AD- | AGT | gscscaacuuCfUfUfgggcuuccguL96 | 1493 | asdCsggdAadGcccadAgAfaguuggcscsa | 1842 |
| 1658200 | | | | | |
| AD- | AGT | cscsaacuucUfUfGfggcuuccguuL96 | 1494 | asdAscgdGadAgcccdAaGfaaguuggscsc | 1843 |
| 1658201 | | | | | |
| AD- | AGT | csasacuucuUfGfGfgcuuccguauL96 | 1495 | asdTsacdGgdAagccdCaAfgaaguugsgsc | 1844 |
| 1658202 | | | | | |
| AD- | AGT | asascuucuuGfGfGfcuuccguauuL96 | 1496 | asdAsuadCgdGaagcdCcAfagaaguusgsg | 1845 |
| 1658203 | | | | | |
| AD- | AGT | ascsuucuugGfGfCfuuccguauauL96 | 1497 | asdTsaudAcdGgaagdCcCfaagaagususg | 1846 |
| 1658204 | | | | | |
| AD- | AGT | csusucuuggGfCfUfuccguauauuL96 | 1498 | asdAsuadTadCggaadGcCfcaagaagsusu | 1847 |
| 1658205 | | | | | |
| AD- | AGT | ususcuugggCfUfUfccguauauauL96 | 1499 | asdTsaudAudAcggadAgCfccaagaasgsu | 1848 |
| 1658206 | | | | | |
| AD- | AGT | uscsuugggcUfUfCfcguauauauuL96 | 1500 | asdAsuadTadTacggdAaGfcccaagasasg | 1849 |
| 1658207 | | | | | |
| AD- | AGT | csusugggcuUfCfCfguauauauguL96 | 1501 | asdCsaudAudAuacgdGaAfgcccaagsasa | 1850 |
| 1658208 | | | | | |
| AD- | AGT | ususgggcuuCfCfGfuauauaugguL96 | 1502 | asdCscadTadTauacdGgAfagcccaasgsa | 1851 |
| 1658209 | | | | | |
| AD- | AGT | gsgsgcuuccGfUfAfuauauggcauL96 | 1503 | asdTsgcdCadTauaudAcGfgaagcccsasa | 1852 |
| 1658211 | | | | | |
| AD- | AGT | gsgscuuccgUfAfUfauauggcauuL96 | 1504 | asdAsugdCcdAuauadTaCfggaagccscsa | 1853 |
| 1658212 | | | | | |
| AD- | AGT | gscsuuccguAfUfAfuauggcauguL96 | 1505 | asdCsaudGcdCauaudAuAfcggaagcscsc | 1854 |
| 1658213 | | | | | |
| AD- | AGT | usasuauaugGfCfAfugcacaguguL96 | 1506 | asdCsacdTgdTgcaudGcCfauauauascsg | 1855 |
| 1658220 | | | | | |
| AD- | AGT | asusauauggCfAfUfgcacagugauL96 | 1507 | asdTscadCudGugcadTgCfcauauausasc | 1856 |
| 1658221 | | | | | |
| AD- | AGT | usasuauggcAfUfGfcacagugaguL96 | 1508 | asdCsucdAcdTgugcdAuGfccauauasusa | 1857 |
| 1658222 | | | | | |
| AD- | AGT | asusauggcaUfGfCfacagugagcuL96 | 1509 | asdGscudCadCugugdCaUfgccauausasu | 1858 |
| 1658223 | | | | | |
| AD- | AGT | usasuggcauGfCfAfcagugagcuuL96 | 1510 | asdAsgcdTcdAcugudGcAfugccauasusa | 1859 |
| 1658224 | | | | | |
| AD- | AGT | asusggcaugCfAfCfagugagcuauL96 | 1511 | asdTsagdCudCacugdTgCfaugccausasu | 1860 |
| 1658225 | | | | | |
| AD- | AGT | usgsgcaugcAfCfAfgugagcuauuL96 | 1512 | asdAsuadGcdTcacudGuGfcaugccasusa | 1861 |
| 1658226 | | | | | |
| AD- | AGT | gsgscaugcaCfAfGfugagcuauguL96 | 1513 | asdCsaudAgdCucacdTgUfgcaugccsasu | 1862 |
| 1658227 | | | | | |
| AD- | AGT | gscsaugcacAfGfUfgagcuaugguL96 | 1514 | asdCscadTadGcucadCuGfugcaugcscsa | 1863 |
| 1658228 | | | | | |
| AD- | AGT | csasugcacaGfUfGfagcuauggguL96 | 1515 | asdCsccdAudAgcucdAcUfgugcaugscsc | 1864 |
| 1684517 | | | | | |
| AD- | AGT | asusgcacagUfGfAfgcuaugggguL96 | 1516 | asdCsccdCadTagcudCaCfugugcausgsc | 1865 |
| 1684519 | | | | | |
| AD- | AGT | cscsucucccCfAfAfcggcugucuuL96 | 1517 | asdAsgadCadGccgudTgGfggagaggsasc | 1866 |
| 1684521 | | | | | |
| AD- | AGT | usgsgcacccUfGfGfccucucucuuL96 | 1518 | asdAsgadGadGaggcdCaGfggugccasasa | 1867 |
| 1658242 | | | | | |
| AD- | AGT | gsgscacccuGfGfCfcucucucuauL96 | 1519 | asdTsagdAgdAgaggdCcAfgggugccsasa | 1868 |
| 1658243 | | | | | |
| AD- | AGT | gsascaggcuAfCfAfggcaauccuuL96 | 1520 | asdAsggdAudTgccudGuAfgccugucsasg | 1869 |
| 1658288 | | | | | |
| AD- | AGT | ascsaggcuaCfAfGfgcaauccuguL96 | 1521 | asdCsagdGadTugccdTgUfagccuguscsa | 1870 |
| 1658289 | | | | | |
| AD- | AGT | ususccuuggAfAfGfgacaagaacuL96 | 1522 | asdGsuudCudTguccdTuCfcaaggaascsa | 1871 |
| 1658313 | | | | | |
| AD- | AGT | cscsuuggaaGfGfAfcaagaacuguL96 | 1523 | asdCsagdTudCuugudCcUfuccaaggsasa | 1872 |
| 1658315 | | | | | |
| AD- | AGT | csusuggaagGfAfCfaagaacugcuL96 | 1524 | asdGscadGudTcuugdTcCfuuccaagsgsa | 1873 |
| 1658316 | | | | | |
| AD- | AGT | csasccugaaGfCfAfgccguuuguuL96 | 1525 | asdAscadAadCggcudGcUfucaggugscsa | 1874 |
| 1658448 | | | | | |
| AD- | AGT | csusgaagcaGfCfCfguuugugcauL96 | 1526 | asdTsgcdAcdAaacgdGcUfgcuucagsgsu | 1875 |
| 1658451 | | | | | |
| AD- | AGT | ususugugcaGfGfGfccuggcucuuL96 | 1527 | asdAsgadGcdCaggcdCcUfgcacaaascsg | 1876 |
| 1658463 | | | | | |
| AD- | AGT | ususgugcagGfGfCfcuggcucucuL96 | 1528 | asdGsagdAgdCcaggdCcCfugcacaasasc | 1877 |
| 1658464 | | | | | |
| AD- | AGT | usgsugcaggGfCfCfuggcucucuuL96 | 1529 | asdAsgadGadGccagdGcCfcugcacasasa | 1878 |
| 1658465 | | | | | |
| AD- | AGT | gsusgcagggCfCfUfggcucucuauL96 | 1530 | asdTsagdAgdAgccadGgCfccugcacsasa | 1879 |
| 1658466 | | | | | |
| AD- | AGT | usgscagggcCfUfGfgcucucuauuL96 | 1531 | asdAsuadGadGagccdAgGfcccugcascsa | 1880 |
| 1658467 | | | | | |
| AD- | AGT | ascsgcucucUfGfGfacuucacaguL96 | 1532 | asdCsugdTgdAagucdCaGfagagcgusgsg | 1881 |
| 1658484 | | | | | |
| AD- | AGT | csgscucucuGfGfAfcuucacagauL96 | 1533 | asdTscudGudGaagudCcAfgagagcgsusg | 1882 |
| 1658485 | | | | | |
| AD- | AGT | csusgagaagAfUfUfgacagguucuL96 | 1534 | asdGsaadCcdTgucadAuCfuucucagscsa | 1883 |
| 1658519 | | | | | |
| AD- | AGT | usgsagaagaUfUfGfacagguucauL96 | 1535 | asdTsgadAcdCugucdAaUfcuucucasgsc | 1884 |
| 1658520 | | | | | |
| AD- | AGT | gsasgaagauUfGfAfcagguucauuL96 | 1536 | asdAsugdAadCcugudCaAfucuucucsasg | 1885 |
| 1658521 | | | | | |
| AD- | AGT | asgsaagauuGfAfCfagguucauguL96 | 1537 | asdCsaudGadAccugdTcAfaucuucuscsa | 1886 |
| 1658522 | | | | | |
| AD- | AGT | gsasagauugAfCfAfgguucaugcuL96 | 1538 | asdGscadTgdAaccudGuCfaaucuucsusc | 1887 |
| 1658523 | | | | | |
| AD- | AGT | asasgauugaCfAfGfguucaugcauL96 | 1539 | asdTsgcdAudGaaccdTgUfcaaucuuscsu | 1888 |
| 1658524 | | | | | |
| AD- | AGT | asgsauugacAfGfGfuucaugcaguL96 | 1540 | asdCsugdCadTgaacdCuGfucaaucususc | 1889 |
| 1658525 | | | | | |
| AD- | AGT | gsasuugacaGfGfUfucaugcagguL96 | 1541 | asdCscudGcdAugaadCcUfgucaaucsusu | 1890 |
| 1658526 | | | | | |
| AD- | AGT | asusugacagGfUfUfcaugcaggcuL96 | 1542 | asdGsccdTgdCaugadAcCfugucaauscsu | 1891 |
| 1658527 | | | | | |
| AD- | AGT | ususgacaggUfUfCfaugcaggcuuL96 | 1543 | asdAsgcdCudGcaugdAaCfcugucaasusc | 1892 |
| 1658528 | | | | | |
| AD- | AGT | usgsacagguUfCfAfugcaggcuguL96 | 1544 | asdCsagdCcdTgcaudGaAfccugucasasu | 1893 |
| 1658529 | | | | | |
| AD- | AGT | gsascagguuCfAfUfgcaggcuguuL96 | 1545 | asdAscadGcdCugcadTgAfaccugucsasa | 1894 |
| 1658530 | | | | | |
| AD- | AGT | ascsagguucAfUfGfcaggcuguguL96 | 1546 | asdCsacdAgdCcugcdAuGfaaccuguscsa | 1895 |
| 1658531 | | | | | |
| AD- | AGT | asusgcaggcUfGfUfgacaggauguL96 | 1547 | asdCsaudCcdTgucadCaGfccugcausgsa | 1896 |
| 1658539 | | | | | |
| AD- | AGT | gscsaggcugUfGfAfcaggauggauL96 | 1548 | asdTsccdAudCcugudCaCfagccugcsasu | 1897 |
| 1658541 | | | | | |
| AD- | AGT | csasggcuguGfAfCfaggauggaauL96 | 1549 | asdTsucdCadTccugdTcAfcagccugscsa | 1898 |
| 1658542 | | | | | |
| AD- | AGT | gscsuuucaaCfAfCfcuacguccauL96 | 1550 | asdTsggdAcdGuaggdTgUfugaaagcscsa | 1899 |
| 1658605 | | | | | |
| AD- | AGT | gsasguucugGfGfUfggacaacaguL96 | 1551 | asdCsugdTudGuccadCcCfagaacucscsu | 1900 |
| 1658650 | | | | | |
| AD- | AGT | gsgsacaacaGfCfAfccucaguguuL96 | 1552 | asdAscadCudGaggudGcUfguuguccsasc | 1901 |
| 1658661 | | | | | |
| AD- | AGT | gsascaacagCfAfCfcucagugucuL96 | 1553 | asdGsacdAcdTgaggdTgCfuguugucscsa | 1902 |
| 1658662 | | | | | |
| AD- | AGT | ascsaacagcAfCfCfucagugucuuL96 | 1554 | asdAsgadCadCugagdGuGfcuguuguscsc | 1903 |
| 1658663 | | | | | |
| AD- | AGT | csasacagcaCfCfUfcagugucuguL96 | 1555 | asdCsagdAcdAcugadGgUfgcuguugsusc | 1904 |
| 1658664 | | | | | |
| AD | AGT | asascagcacCfUfCfagugucuguuL96 | 1556 | asdAscadGadCacugdAgGfugcuguusgsu | 1905 |
| 1658665 | | | | | |
| AD- | AGT | asusgccucuGfAfCfcuggacaaguL96 | 1557 | asdCsuudGudCcaggdTcAfgaggcausasg | 1906 |
| 1658801 | | | | | |
| AD- | AGT | asasgguggaGfGfGfucucacuuuuL96 | 1558 | asdAsaadGudGagacdCcUfccaccuusgsu | 1907 |
| 1658818 | | | | | |
| AD- | AGT | asgsguggagGfGfUfcucacuuucuL96 | 1559 | asdGsaadAgdTgagadCcCfuccaccususg | 1908 |
| 1658819 | | | | | |
| AD- | AGT | gsgsuggaggGfUfCfucacuuuccuL96 | 1560 | asdGsgadAadGugagdAcCfcuccaccsusu | 1909 |
| 1658820 | | | | | |
| AD- | AGT | gsasgggucuCfAfCfuuuccagcauL96 | 1561 | asdTsgcdTgdGaaagdTgAfgacccucscsa | 1910 |
| 1658824 | | | | | |
| AD- | AGT | asgsggucucAfCfUfuuccagcaauL96 | 1562 | asdTsugdCudGgaaadGuGfagacccuscsc | 1911 |
| 1658825 | | | | | |
| AD- | AGT | gsgsucucacUfUfUfccagcaaaauL96 | 1563 | asdTsuudTgdCuggadAaGfugagaccscsu | 1912 |
| 1658827 | | | | | |
| AD- | AGT | gsuscucacuUfUfCfcagcaaaacuL96 | 1564 | asdGsuudTudGcuggdAaAfgugagacscsc | 1913 |
| 1658828 | | | | | |
| AD- | AGT | uscsucacuuUfCfCfagcaaaacuuL96 | 1565 | asdAsgudTudTgcugdGaAfagugagascsc | 1914 |
| 1658829 | | | | | |
| AD- | AGT | csuscacuuuCfCfAfgcaaaacucuL96 | 1566 | asdGsagdTudTugcudGgAfaagugagsasc | 1915 |
| 1658830 | | | | | |
| AD- | AGT | uscsacuuucCfAfGfcaaaacuccuL96 | 1567 | asdGsgadGudTuugcdTgGfaaagugasgsa | 1916 |
| 1658831 | | | | | |
| AD- | AGT | csascuuuccAfGfCfaaaacucccuL96 | 1568 | asdGsggdAgdTuuugdCuGfgaaagugsasg | 1917 |
| 1658832 | | | | | |
| AD- | AGT | ascsuuuccaGfCfAfaaacucccuuL96 | 1569 | asdAsggdGadGuuuudGcUfggaaagusgsa | 1918 |
| 1658833 | | | | | |
| AD- | AGT | csusuuccagCfAfAfaacucccucuL96 | 1570 | asdGsagdGgdAguuudTgCfuggaaagsusg | 1919 |
| 1658834 | | | | | |
| AD- | AGT | ususuccagcAfAfAfacucccucauL96 | 1571 | asdTsgadGgdGaguudTuGfcuggaaasgsu | 1920 |
| 1658835 | | | | | |
| AD- | AGT | ususccagcaAfAfAfcucccucaauL96 | 1572 | asdTsugdAgdGgagudTuUfgcuggaasasg | 1921 |
| 1658836 | | | | | |
| AD- | AGT | uscscagcaaAfAfCfucccucaacuL96 | 1573 | asdGsuudGadGggagdTuUfugcuggasasa | 1922 |
| 1658837 | | | | | |
| AD- | AGT | cscsagcaaaAfCfUfcccucaacuuL96 | 1574 | asdAsgudTgdAgggadGuUfuugcuggsasa | 1923 |
| 1658838 | | | | | |
| AD- | AGT | csasgcaaaaCfUfCfccucaacuguL96 | 1575 | asdCsagdTudGagggdAgUfuuugcugsgsa | 1924 |
| 1658839 | | | | | |
| AD- | AGT | asgscaaaacUfCfCfcucaacugguL96 | 1576 | asdCscadGudTgaggdGaGfuuuugcusgsg | 1925 |
| 1658840 | | | | | |
| AD- | AGT | gscsaaaacuCfCfCfucaacuggauL96 | 1577 | asdTsccdAgdTugagdGgAfguuuugcsusg | 1926 |
| 1658841 | | | | | |
| AD- | AGT | csasaaacucCfCfUfcaacuggauuL96 | 1578 | asdAsucdCadGuugadGgGfaguuuugscsu | 1927 |
| 1658842 | | | | | |
| AD- | AGT | asasaacuccCfUfCfaacuggauguL96 | 1579 | asdCsaudCcdAguugdAgGfgaguuuusgsc | 1928 |
| 1658843 | | | | | |
| AD- | AGT | asasacucccUfCfAfacuggaugauL96 | 1580 | asdTscadTcdCaguudGaGfggaguuususg | 1929 |
| 1658844 | | | | | |
| AD- | AGT | asascucccuCfAfAfcuggaugaauL96 | 1581 | asdTsucdAudCcagudTgAfgggaguususu | 1930 |
| 1658845 | | | | | |
| AD- | AGT | ascsucccucAfAfCfuggaugaaguL96 | 1582 | asdCsuudCadTccagdTuGfagggagususu | 1931 |
| 1658846 | | | | | |
| AD- | AGT | csuscccucaAfCfUfggaugaagauL96 | 1583 | asdTscudTcdAuccadGuUfgagggagsusu | 1932 |
| 1658847 | | | | | |
| AD- | AGT | uscsccucaaCfUfGfgaugaagaauL96 | 1584 | asdTsucdTudCauccdAgUfugagggasgsu | 1933 |
| 1658848 | | | | | |
| AD- | AGT | cscscucaacUfGfGfaugaagaaauL96 | 1585 | asdTsuudCudTcaucdCaGfuugagggsasg | 1934 |
| 1658849 | | | | | |
| AD- | AGT | cscsucaacuGfGfAfugaagaaacuL96 | 1586 | asdGsuudTcdTucaudCcAfguugaggsgsa | 1935 |
| 1321390 | | | | | |
| AD- | AGT | csuscaacugGfAfUfgaagaaacuuL96 | 1587 | asdAsgudTudCuucadTcCfaguugagsgsg | 1936 |
| 1658850 | | | | | |
| AD- | AGT | asgsgaucuuAfUfGfaccugcagguL96 | 1588 | asdCscudGcdAggucdAuAfagauccususg | 1937 |
| 1658875 | | | | | |
| AD- | AGT | csusuaugacCfUfGfcaggaccuguL96 | 1589 | asdCsagdGudCcugcdAgGfucauaagsasu | 1938 |
| 1658880 | | | | | |
| AD- | AGT | csgsagcugaAfCfCfugcaaaaauuL96 | 1590 | asdAsuudTudTgcagdGuUfcagcucgsgsu | 1939 |
| 1658929 | | | | | |
| AD- | AGT | gsasgcugaaCfCfUfgcaaaaauuuL96 | 1591 | asdAsaudTudTugcadGgUfucagcucsgsg | 1940 |
| 1658930 | | | | | |
| AD- | AGT | asgscugaacCfUfGfcaaaaauuguL96 | 1592 | asdCsaadTudTuugcdAgGfuucagcuscsg | 1941 |
| 1658931 | | | | | |
| AD- | AGT | gscsugaaccUfGfCfaaaaauugauL96 | 1593 | asdTscadAudTuuugdCaGfguucagcsusc | 1942 |
| 1658932 | | | | | |
| AD- | AGT | csusgaaccuGfCfAfaaaauugaguL96 | 1594 | asdCsucdAadTuuuudGcAfgguucagscsu | 1943 |
| 1658933 | | | | | |
| AD- | AGT | usgsaaccugCfAfAfaaauugagcuL96 | 1595 | asdGscudCadAuuuudTgCfagguucasgsc | 1944 |
| 1658934 | | | | | |
| AD- | AGT | gsasaccugcAfAfAfaauugagcauL96 | 1596 | asdTsgcdTcdAauuudTuGfcagguucsasg | 1945 |
| 1658935 | | | | | |
| AD- | AGT | asasccugcaAfAfAfauugagcaauL96 | 1597 | asdTsugdCudCaauudTuUfgcagguuscsa | 1946 |
| 1658936 | | | | | |
| AD- | AGT | ascscugcaaAfAfAfuugagcaauuL96 | 1598 | asdAsuudGcdTcaaudTuUfugcaggususc | 1947 |
| 1658937 | | | | | |
| AD- | AGT | cscsugcaaaAfAfUfugagcaauguL96 | 1599 | asdCsaudTgdCucaadTuUfuugcaggsusu | 1948 |
| 1658938 | | | | | |
| AD- | AGT | csusgcaaaaAfUfUfgagcaaugauL96 | 1600 | asdTscadTudGcucadAuUfuuugcagsgsu | 1949 |
| 1658939 | | | | | |
| AD- | AGT | usgscaaaaaUfUfGfagcaaugacuL96 | 1601 | asdGsucdAudTgcucdAaUfuuuugcasgsg | 1950 |
| 1658940 | | | | | |
| AD- | AGT | gsasggugcuGfAfAfcagcauuuuuL96 | 1602 | asdAsaadAudGcugudTcAfgcaccucscsc | 1951 |
| 1658954 | | | | | |
| AD- | AGT | asgsgugcugAfAfCfagcauuuuuuL96 | 1603 | asdAsaadAadTgcugdTuCfagcaccuscsc | 1952 |
| 1658955 | | | | | |
| AD- | AGT | gsgsugcugaAfCfAfgcauuuuuuuL96 | 1604 | asdAsaadAadAugcudGuUfcagcaccsusc | 1953 |
| 1658956 | | | | | |
| AD- | AGT | gsusgcugaaCfAfGfcauuuuuuuuL96 | 1605 | asdAsaadAadAaugcdTgUfucagcacscsu | 1954 |
| 1658957 | | | | | |
| AD- | AGT | usgscugaacAfGfCfauuuuuuuuuL96 | 1606 | asdAsaadAadAaaugdCuGfuucagcascsc | 1955 |
| 1658958 | | | | | |
| AD- | AGT | gscsugaacaGfCfAfuuuuuuuuguL96 | 1607 | asdCsaadAadAaaaudGcUfguucagcsasc | 1956 |
| 1658959 | | | | | |
| AD- | AGT | csusgaacagCfAfUfuuuuuuugauL96 | 1608 | asdTscadAadAaaaadTgCfuguucagscsa | 1957 |
| 1658960 | | | | | |
| AD- | AGT | usgsagagagAfGfCfccacagaguuL96 | 1609 | asdAscudCudGugggdCuCfucucucasusc | 1958 |
| 1658992 | | | | | |
| AD- | AGT | asgsagagagCfCfCfacagagucuuL96 | 1610 | asdAsgadCudCugugdGgCfucucucuscsa | 1959 |
| 1658994 | | | | | |
| AD- | AGT | gsasgagagcCfCfAfcagagucuauL96 | 1611 | asdTsagdAcdTcugudGgGfcucucucsusc | 1960 |
| 1658995 | | | | | |
| AD- | AGT | gsasaccgccCfAfUfuccuguuuguL96 | 1612 | asdCsaadAcdAggaadTgGfgcgguucsasg | 1961 |
| 1659055 | | | | | |
| AD- | AGT | asasccgcccAfUfUfccuguuugcuL96 | 1613 | asdGscadAadCaggadAuGfggcgguuscsa | 1962 |
| 1659056 | | | | | |
| AD- | AGT | ascscgcccaUfUfCfcuguuugcuuL96 | 1614 | asdAsgcdAadAcaggdAaUfgggcggususc | 1963 |
| 1659057 | | | | | |
| AD- | AGT | cscsgcccauUfCfCfuguuugcuguL96 | 1615 | asdCsagdCadAacagdGaAfugggcggsusu | 1964 |
| 1659058 | | | | | |
| AD- | AGT | csgscccauuCfCfUfguuugcuguuL96 | 1616 | asdAscadGcdAaacadGgAfaugggcgsgsu | 1965 |
| 1659059 | | | | | |
| AD- | AGT | gscsccauucCfUfGfuuugcuguguL96 | 1617 | asdCsacdAgdCaaacdAgGfaaugggcsgsg | 1966 |
| 1659060 | | | | | |
| AD- | AGT | cscscauuccUfGfUfuugcuguguuL96 | 1618 | asdAscadCadGcaaadCaGfgaaugggscsg | 1967 |
| 1659061 | | | | | |
| AD- | AGT | cscsauuccuGfUfUfugcuguguauL96 | 1619 | asdTsacdAcdAgcaadAcAfggaauggsgsc | 1968 |
| 1659062 | | | | | |
| AD- | AGT | csasuuccugUfUfUfgcuguguauuL96 | 1620 | asdAsuadCadCagcadAaCfaggaaugsgsg | 1969 |
| 1659063 | | | | | |
| AD- | AGT | asusuccuguUfUfGfcuguguauguL96 | 1621 | asdCsaudAcdAcagcdAaAfcaggaausgsg | 1970 |
| 1659064 | | | | | |
| AD- | AGT | ususccuguuUfGfCfuguguaugauL96 | 1622 | asdTscadTadCacagdCaAfacaggaasusg | 1971 |
| 1659065 | | | | | |
| AD- | AGT | uscscuguuuGfCfUfguguaugauuL96 | 1623 | asdAsucdAudAcacadGcAfaacaggasasu | 1972 |
| 1659066 | | | | | |
| AD- | AGT | cscsuguuugCfUfGfuguaugaucuL96 | 1624 | asdGsaudCadTacacdAgCfaaacaggsasa | 1973 |
| 1659067 | | | | | |
| AD- | AGT | csusguuugcUfGfUfguaugaucauL96 | 1625 | asdTsgadTcdAuacadCaGfcaaacagsgsa | 1974 |
| 1659068 | | | | | |
| AD- | AGT | usgsuuugcuGfUfGfuaugaucaauL96 | 1626 | asdTsugdAudCauacdAcAfgcaaacasgsg | 1975 |
| 1659069 | | | | | |
| AD- | AGT | gsusuugcugUfGfUfaugaucaaauL96 | 1627 | asdTsuudGadTcauadCaCfagcaaacsasg | 1976 |
| 1659070 | | | | | |
| AD- | AGT | ususugcuguGfUfAfugaucaaaguL96 | 1628 | asdCsuudTgdAucaudAcAfcagcaaascsa | 1977 |
| 1659071 | | | | | |
| AD- | AGT | cscsccagucUfCfCfcaccuuuucuL96 | 1629 | asdGsaadAadGguggdGaGfacuggggsgsu | 1978 |
| 1684529 | | | | | |
| AD- | AGT | cscscagucuCfCfCfaccuuuucuuL96 | 1630 | asdAsgadAadAggugdGgAfgacugggsgsg | 1979 |
| 1684531 | | | | | |
| AD- | AGT | cscsagucucCfCfAfccuuuucuuuL96 | 1631 | asdAsagdAadAaggudGgGfagacuggsgsg | 1980 |
| 1684533 | | | | | |
| AD- | AGT | asgsucucccAfCfCfuuuucuucuuL96 | 1632 | asdAsgadAgdAaaagdGuGfggagacusgsg | 1981 |
| 1684535 | | | | | |
| AD- | AGT | gsuscucccaCfCfUfuuucuucuauL96 | 1633 | asdTsagdAadGaaaadGgUfgggagacsusg | 1982 |
| 1659162 | | | | | |
| AD- | hAGT | uscsucccacCfUfUfuucuucuaauL96 | 1634 | asdTsuadGadAgaaadAgGfugggagascsu | 1983 |
| 1321384 | | | | | |
| AD- | AGT | csuscccaccUfUfUfucuucuaauuL96 | 1635 | asdAsuudAgdAagaadAaGfgugggagsasc | 1984 |
| 1659163 | | | | | |
| AD- | AGT | uscsccaccuUfUfUfcuucuaauguL96 | 1636 | asdCsaudTadGaagadAaAfggugggasgsa | 1985 |
| 1659164 | | | | | |
| AD- | AGT | cscscaccuuUfUfCfuucuaaugauL96 | 1637 | asdTscadTudAgaagdAaAfaggugggsasg | 1986 |
| 1659165 | | | | | |
| AD- | AGT | cscsaccuuuUfCfUfucuaaugaguL96 | 1638 | asdCsucdAudTagaadGaAfaagguggsgsa | 1987 |
| 1659166 | | | | | |
| AD- | AGT | csasccuuuuCfUfUfcuaaugaguuL96 | 1639 | asdAscudCadTuagadAgAfaaaggugsgsg | 1988 |
| 1659167 | | | | | |
| AD- | AGT | ascscuuuucUfUfCfuaaugagucuL96 | 1640 | asdGsacdTcdAuuagdAaGfaaaaggusgsg | 1989 |
| 1659168 | | | | | |
| AD- | AGT | cscsguuucuCfCfUfuggucuaaguL96 | 1641 | asdCsuudAgdAccaadGgAfgaaacggscsu | 1990 |
| 1659208 | | | | | |
| AD- | AGT | csgsuuucucCfUfUfggucuaaguuL96 | 1642 | asdAscudTadGaccadAgGfagaaacgsgsc | 1991 |
| 1659209 | | | | | |
| AD- | AGT | gsusuucuccUfUfGfgucuaaguguL96 | 1643 | asdCsacdTudAgaccdAaGfgagaaacsgsg | 1992 |
| 1659210 | | | | | |
| AD- | AGT | gsusuugcugGfGfUfuuauuuuaguL96 | 1644 | asdCsuadAadAuaaadCcCfagcaaacsusg | 1993 |
| 1659282 | | | | | |
| AD- | AGT | ususugcuggGfUfUfuauuuuagauL96 | 1645 | asdTscudAadAauaadAcCfcagcaaascsu | 1994 |
| 1659283 | | | | | |
| AD- | AGT | ususgcugggUfUfUfauuuuagaguL96 | 1646 | asdCsucdTadAaauadAaCfccagcaasasc | 1995 |
| 1659284 | | | | | |
| AD- | AGT | usgscuggguUfUfAfuuuuagagauL96 | 1647 | asdTscudCudAaaaudAaAfcccagcasasa | 1996 |
| 1659285 | | | | | |
| AD- | AGT | gscsuggguuUfAfUfuuuagagaauL96 | 1648 | asdTsucdTcdTaaaadTaAfacccagcsasa | 1997 |
| 1659286 | | | | | |
| AD- | AGT | csusggguuuAfUfUfuuagagaauuL96 | 1649 | asdAsuudCudCuaaadAuAfaacccagscsa | 1998 |
| 1659287 | | | | | |
| AD- | AGT | usgsgguuuaUfUfUfuagagaauguL96 | 1650 | asdCsaudTcdTcuaadAaUfaaacccasgsc | 1999 |
| 1659288 | | | | | |
| AD- | AGT | gsgsguuuauUfUfUfagagaaugguL96 | 1651 | asdCscadTudCucuadAaAfuaaacccsasg | 2000 |
| 1659289 | | | | | |
| AD- | AGT | gsgsuuuauuUfUfAfgagaauggguL96 | 1652 | asdCsccdAudTcucudAaAfauaaaccscsa | 2001 |
| 1684537 | | | | | |
| AD- | AGT | gsusuuauuuUfAfGfagaaugggguL96 | 1653 | asdCsccdCadTucucdTaAfaauaaacscsc | 2002 |
| 1684539 | | | | | |
| AD- | AGT | ususuauuuuAfGfAfgaauggggguL96 | 1654 | asdCsccdCcdAuucudCuAfaaauaaascsc | 2003 |
| 1684541 | | | | | |
| AD- | AGT | asgsaaugggGfGfUfggggaggcauL96 | 1655 | asdTsgcdCudCcccadCcCfccauucuscsu | 2004 |
| 1684543 | | | | | |
| AD- | AGT | gsasauggggGfUfGfgggaggcaauL96 | 1656 | asdTsugdCcdTccccdAcCfcccauucsusc | 2005 |
| 1684545 | | | | | |
| AD- | AGT | asasugggggUfGfGfggaggcaaguL96 | 1657 | asdCsuudGcdCucccdCaCfccccauuscsu | 2006 |
| 1684547 | | | | | |
| AD- | AGT | asusggggguGfGfGfgaggcaagauL96 | 1658 | asdTscudTgdCcuccdCcAfcccccaususc | 2007 |
| 1684549 | | | | | |
| AD- | AGT | usgsggggugGfGfGfaggcaagaauL96 | 1659 | asdTsucdTudGccucdCcCfacccccasusu | 2008 |
| 1684551 | | | | | |
| AD- | AGT | gsgsggguggGfGfAfggcaagaacuL96 | 1660 | asdGsuudCudTgccudCcCfcacccccsasu | 2009 |
| 1684553 | | | | | |
| AD- | AGT | gsusggggagGfCfAfagaaccaguuL96 | 1661 | asdAscudGgdTucuudGcCfuccccacscsc | 2010 |
| 1684555 | | | | | |
| AD- | AGT | usgsgggaggCfAfAfgaaccaguguL96 | 1662 | asdCsacdTgdGuucudTgCfcuccccascsc | 2011 |
| 1684557 | | | | | |
| AD- | AGT | gsgsggaggcAfAfGfaaccaguguuL96 | 1663 | asdAscadCudGguucdTuGfccuccccsasc | 2012 |
| 1684559 | | | | | |
| AD- | AGT | gsgsgaggcaAfGfAfaccaguguuuL96 | 1664 | asdAsacdAcdTgguudCuUfgccucccscsa | 2013 |
| 1684560 | | | | | |
| AD- | AGT | gsgsaggcaaGfAfAfccaguguuuuL96 | 1665 | asdAsaadCadCuggudTcUfugccuccscsc | 2014 |
| 1684561 | | | | | |
| AD- | AGT | gsasggcaagAfAfCfcaguguuuauL96 | 1666 | asdTsaadAcdAcuggdTuCfuugccucscsc | 2015 |
| 1659290 | | | | | |
| AD- | AGT | asgsgcaagaAfCfCfaguguuuaguL96 | 1667 | asdCsuadAadCacugdGuUfcuugccuscsc | 2016 |
| 1659291 | | | | | |
| AD- | AGT | gsgscaagaaCfCfAfguguuuagcuL96 | 1668 | asdGscudAadAcacudGgUfucuugccsusc | 2017 |
| 1659292 | | | | | |
| AD- | AGT | gscsaagaacCfAfGfuguuuagcguL96 | 1669 | asdCsgcdTadAacacdTgGfuucuugcscsu | 2018 |
| 1659293 | | | | | |
| AD- | AGT | csasagaaccAfGfUfguuuagcgcuL96 | 1670 | asdGscgdCudAaacadCuGfguucuugscsc | 2019 |
| 1659294 | | | | | |
| AD- | AGT | asasgaaccaGfUfGfuuuagcgcguL96 | 1671 | asdCsgcdGcdTaaacdAcUfgguucuusgsc | 2020 |
| 1659295 | | | | | |
| AD- | AGT | asgsaaccagUfGfUfuuagcgcgguL96 | 1672 | asdCscgdCgdCuaaadCaCfugguucususg | 2021 |
| 1659296 | | | | | |
| AD- | AGT | gsasaccaguGfUfUfuagcgcggguL96 | 1673 | asdCsccdGcdGcuaadAcAfcugguucsusu | 2022 |
| 1659297 | | | | | |
| AD- | AGT | asasccagugUfUfUfagcgcgggauL96 | 1674 | asdTsccdCgdCgcuadAaCfacugguuscsu | 2023 |
| 1659298 | | | | | |
| AD- | AGT | csusguuccaAfAfAfagaauuccauL96 | 1675 | asdTsggdAadTucuudTuUfggaacagsusa | 2024 |
| 1659321 | | | | | |
| AD- | AGT | gsusuccaaaAfAfGfaauuccaacuL96 | 1676 | asdGsuudGgdAauucdTuUfuuggaacsasg | 2025 |
| 1659323 | | | | | |
| AD- | AGT | uscscaaaaaGfAfAfuuccaaccguL96 | 1677 | asdCsggdTudGgaaudTcUfuuuuggasasc | 2026 |
| 1659325 | | | | | |
| AD- | AGT | cscsaaaaagAfAfUfuccaaccgauL96 | 1678 | asdTscgdGudTggaadTuCfuuuuuggsasa | 2027 |
| 1659326 | | | | | |
| AD- | AGT | csasaaaagaAfUfUfccaaccgacuL96 | 1679 | asdGsucdGgdTuggadAuUfcuuuuugsgsa | 2028 |
| 1659327 | | | | | |
| AD- | AGT | asasaaagaaUfUfCfcaaccgaccuL96 | 1680 | asdGsgudCgdGuuggdAaUfucuuuuusgsg | 2029 |
| 1659328 | | | | | |
| AD- | AGT | asasaagaauUfCfCfaaccgaccauL96 | 1681 | asdTsggdTcdGguugdGaAfuucuuuususg | 2030 |
| 1659329 | | | | | |
| AD- | AGT | asasagaauuCfCfAfaccgaccaguL96 | 1682 | asdCsugdGudCgguudGgAfauucuuususu | 2031 |
| 1659330 | | | | | |
| AD- | AGT | asasgaauucCfAfAfccgaccagcuL96 | 1683 | asdGscudGgdTcggudTgGfaauucuususu | 2032 |
| 1659331 | | | | | |
| AD- | AGT | asgsaauuccAfAfCfcgaccagcuuL96 | 1684 | asdAsgcdTgdGucggdTuGfgaauucususu | 2033 |
| 1659332 | | | | | |
| AD- | AGT | gsasauuccaAfCfCfgaccagcuuuL96 | 1685 | asdAsagdCudGgucgdGuUfggaauucsusu | 2034 |
| 1659333 | | | | | |
| AD- | AGT | asasuuccaaCfCfGfaccagcuuguL96 | 1686 | asdCsaadGcdTggucdGgUfuggaauuscsu | 2035 |
| 1659334 | | | | | |
| AD- | AGT | asusuccaacCfGfAfccagcuuguuL96 | 1687 | asdAscadAgdCuggudCgGfuuggaaususc | 2036 |
| 1659335 | | | | | |
| AD- | AGT | ususccaaccGfAfCfcagcuuguuuL96 | 1688 | asdAsacdAadGcuggdTcGfguuggaasusu | 2037 |
| 1659336 | | | | | |
| AD- | AGT | uscscaaccgAfCfCfagcuuguuuuL96 | 1689 | asdAsaadCadAgcugdGuCfgguuggasasu | 2038 |
| 1659337 | | | | | |
| AD- | AGT | cscsaaccgaCfCfAfgcuuguuuguL96 | 1690 | asdCsaadAcdAagcudGgUfcgguuggsasa | 2039 |
| 1659338 | | | | | |
| AD- | AGT | csasaccgacCfAfGfcuuguuuguuL96 | 1691 | asdAscadAadCaagcdTgGfucgguugsgsa | 2040 |
| 1659339 | | | | | |
| AD- | AGT | asasccgaccAfGfCfuuguuuguguL96 | 1692 | asdCsacdAadAcaagdCuGfgucgguusgsg | 2041 |
| 1659340 | | | | | |
| AD- | AGT | ascscgaccaGfCfUfuguuugugauL96 | 1693 | asdTscadCadAacaadGcUfggucggususg | 2042 |
| 1659341 | | | | | |
| AD- | AGT | cscsgaccagCfUfUfguuugugaauL96 | 1694 | asdTsucdAcdAaacadAgCfuggucggsusu | 2043 |
| 1659342 | | | | | |
| AD- | AGT | csgsaccagcUfUfGfuuugugaaauL96 | 1695 | asdTsuudCadCaaacdAaGfcuggucgsgsu | 2044 |
| 1659343 | | | | | |
| AD- | AGT | gsasccagcuUfGfUfuugugaaacuL96 | 1696 | asdGsuudTcdAcaaadCaAfgcuggucsgsg | 2045 |
| 1659344 | | | | | |
| AD- | AGT | ascscagcuuGfUfUfugugaaacauL96 | 1697 | asdTsgudTudCacaadAcAfagcugguscsg | 2046 |
| 1659345 | | | | | |
| AD- | AGT | cscsagcuugUfUfUfgugaaacaauL96 | 1698 | asdTsugdTudTcacadAaCfaagcuggsusc | 2047 |
| 1659346 | | | | | |
| AD- | AGT | csasgcuuguUfUfGfugaaacaaauL96 | 1699 | asdTsuudGudTucacdAaAfcaagcugsgsu | 2048 |
| 1659347 | | | | | |
| AD- | AGT | asgscuuguuUfGfUfgaaacaaaauL96 | 1700 | asdTsuudTgdTuucadCaAfacaagcusgsg | 2049 |
| 1659348 | | | | | |
| AD- | AGT | gscsuuguuuGfUfGfaaacaaaaauL96 | 1701 | asdTsuudTudGuuucdAcAfaacaagcsusg | 2050 |
| 1659349 | | | | | |
| AD- | AGT | csusuguuugUfGfAfaacaaaaaauL96 | 1702 | asdTsuudTudTguuudCaCfaaacaagscsu | 2051 |
| 1659350 | | | | | |
| AD- | AGT | ususguuuguGfAfAfacaaaaaaguL96 | 1703 | asdCsuudTudTuguudTcAfcaaacaasgsc | 2052 |
| 1659351 | | | | | |
| AD- | AGT | usgsuucccuUfUfUfcaaguugaguL96 | 1704 | asdCsucdAadCuugadAaAfgggaacascsu | 2053 |
| 1659371 | | | | | |
| AD- | AGT | gsusucccuuUfUfCfaaguugagauL96 | 1705 | asdTscudCadAcuugdAaAfagggaacsasc | 2054 |
| 1659372 | | | | | |
| AD- | AGT | ususcccuuuUfCfAfaguugagaauL96 | 1706 | asdTsucdTcdAacuudGaAfaagggaascsa | 2055 |
| 1659373 | | | | | |
| AD- | AGT | csasaguugaGfAfAfcaaaaauuguL96 | 1707 | asdCsaadTudTuugudTcUfcaacuugsasa | 2056 |
| 1659382 | | | | | |
| AD- | AGT | asasguugagAfAfCfaaaaauugguL96 | 1708 | asdCscadAudTuuugdTuCfucaacuusgsa | 2057 |
| 1659383 | | | | | |
| AD- | AGT | asgsuugagaAfCfAfaaaauuggguL96 | 1709 | asdCsccdAadTuuuudGuUfcucaacususg | 2058 |
| 1659384 | | | | | |
| AD- | AGT | gsusugagaaCfAfAfaaauuggguuL96 | 1710 | asdAsccdCadAuuuudTgUfucucaacsusu | 2059 |
| 1659385 | | | | | |
| AD- | AGT | ususgagaacAfAfAfaauuggguuuL96 | 1711 | asdAsacdCcdAauuudTuGfuucucaascsu | 2060 |
| 1659386 | | | | | |
| AD- | AGT | usgsagaacaAfAfAfauuggguuuuL96 | 1712 | asdAsaadCcdCaauudTuUfguucucasasc | 2061 |
| 1659387 | | | | | |
| AD- | AGT | gsasgaacaaAfAfAfuuggguuuuuL96 | 1713 | asdAsaadAcdCcaaudTuUfuguucucsasa | 2062 |
| 1659388 | | | | | |
| AD- | AGT | asgsaacaaaAfAfUfuggguuuuauL96 | 1714 | asdTsaadAadCccaadTuUfuuguucuscsa | 2063 |
| 1659389 | | | | | |
| AD- | AGT | gsasacaaaaAfUfUfggguuuuaauL96 | 1715 | asdTsuadAadAcccadAuUfuuuguucsusc | 2064 |
| 1659390 | | | | | |
| AD- | AGT | asgsuauacaUfUfUfuugcauugcuL96 | 1716 | asdGscadAudGcaaadAaUfguauacususu | 2065 |
| 1659399 | | | | | |
| AD- | AGT | gsusauacauUfUfUfugcauugccuL96 | 1717 | asdGsgcdAadTgcaadAaAfuguauacsusu | 2066 |
| 1659400 | | | | | |
| AD- | AGT | usasuacauuUfUfUfgcauugccuuL96 | 1718 | asdAsggdCadAugcadAaAfauguauascsu | 2067 |
| 1659401 | | | | | |
| AD- | AGT | asusacauuuUfUfGfcauugccuuuL96 | 1719 | asdAsagdGcdAaugcdAaAfaauguausasc | 2068 |
| 1659402 | | | | | |
| AD- | AGT | asusuuuugcAfUfUfgccuucgguuL96 | 1720 | asdAsccdGadAggcadAuGfcaaaaausgsu | 2069 |
| 1659406 | | | | | |
| AD- | AGT | ususuuugcaUfUfGfccuucgguuuL96 | 1721 | asdAsacdCgdAaggcdAaUfgcaaaaasusg | 2070 |
| 1659407 | | | | | |
| AD- | AGT | ususuugcauUfGfCfcuucgguuuuL96 | 1722 | asdAsaadCcdGaaggdCaAfugcaaaasasu | 2071 |
| 1659408 | | | | | |
| AD- | AGT | ususugcauuGfCfCfuucgguuuguL96 | 1723 | asdCsaadAcdCgaagdGcAfaugcaaasasa | 2072 |
| 1659409 | | | | | |
| AD- | AGT | ususgcauugCfCfUfucgguuuguuL96 | 1724 | asdAscadAadCcgaadGgCfaaugcaasasa | 2073 |
| 1659410 | | | | | |
| AD- | AGT | usgscauugcCfUfUfcgguuuguauL96 | 1725 | asdTsacdAadAccgadAgGfcaaugcasasa | 2074 |
| 1659411 | | | | | |
| AD- | AGT | gscsauugccUfUfCfgguuuguauuL96 | 1726 | asdAsuadCadAaccgdAaGfgcaaugcsasa | 2075 |
| 1659412 | | | | | |
| AD- | AGT | csasuugccuUfCfGfguuuguauuuL96 | 1727 | asdAsaudAcdAaaccdGaAfggcaaugscsa | 2076 |
| 1659413 | | | | | |
| AD- | AGT | asusugccuuCfGfGfuuuguauuuuL96 | 1728 | asdAsaadTadCaaacdCgAfaggcaausgsc | 2077 |
| 1659414 | | | | | |
| AD- | AGT | ususgccuucGfGfUfuuguauuuauL96 | 1729 | asdTsaadAudAcaaadCcGfaaggcaasusg | 2078 |
| 1659415 | | | | | |
| AD- | AGT | usgsccuucgGfUfUfuguauuuaguL96 | 1730 | asdCsuadAadTacaadAcCfgaaggcasasu | 2079 |
| 1659416 | | | | | |
| AD- | AGT | gscscuucggUfUfUfguauuuaguuL96 | 1731 | asdAscudAadAuacadAaCfcgaaggcsasa | 2080 |
| 1659417 | | | | | |
| AD- | AGT | cscsuucgguUfUfGfuauuuaguguL96 | 1732 | asdCsacdTadAauacdAaAfccgaaggscsa | 2081 |
| 1659418 | | | | | |
| AD- | AGT | csusucgguuUfGfUfauuuaguguuL96 | 1733 | asdAscadCudAaauadCaAfaccgaagsgsc | 2082 |
| 1659419 | | | | | |
| AD- | AGT | ususcgguuuGfUfAfuuuagugucuL96 | 1734 | asdGsacdAcdTaaaudAcAfaaccgaasgsg | 2083 |
| 1659420 | | | | | |
| AD- | AGT | uscsgguuugUfAfUfuuagugucuuL96 | 1735 | asdAsgadCadCuaaadTaCfaaaccgasasg | 2084 |
| 1659421 | | | | | |
| AD- | AGT | csgsguuuguAfUfUfuagugucuuuL96 | 1736 | asdAsagdAcdAcuaadAuAfcaaaccgsasa | 2085 |
| 1659422 | | | | | |
| AD- | AGT | gsgsuuuguaUfUfUfagugucuuguL96 | 1737 | asdCsaadGadCacuadAaUfacaaaccsgsa | 2086 |
| 1659423 | | | | | |
| AD- | AGT | gsusuuguauUfUfAfgugucuugauL96 | 1738 | asdTscadAgdAcacudAaAfuacaaacscsg | 2087 |
| 1659424 | | | | | |
| AD- | AGT | ususuguauuUfAfGfugucuugaauL96 | 1739 | asdTsucdAadGacacdTaAfauacaaascsc | 2088 |
| 1659425 | | | | | |
| AD- | AGT | ususguauuuAfGfUfgucuugaauuL96 | 1740 | asdAsuudCadAgacadCuAfaauacaasasc | 2089 |
| 1659426 | | | | | |
| AD- | AGT | usgsuauuuaGfUfGfucuugaauguL96 | 1741 | asdCsaudTcdAagacdAcUfaaauacasasa | 2090 |
| 1659427 | | | | | |
| AD- | AGT | gsusauuuagUfGfUfcuugaauguuL96 | 1742 | asdAscadTudCaagadCaCfuaaauacsasa | 2091 |
| 1659428 | | | | | |
| AD- | AGT | usasuuuaguGfUfCfuugaauguauL96 | 1743 | asdTsacdAudTcaagdAcAfcuaaauascsa | 2092 |
| 1659429 | | | | | |
| AD- | AGT | asusuuagugUfCfUfugaauguaauL96 | 1744 | asdTsuadCadTucaadGaCfacuaaausasc | 2093 |
| 1659430 | | | | | |
| AD- | AGT | ususuaguguCfUfUfgaauguaaguL96 | 1745 | asdCsuudAcdAuucadAgAfcacuaaasusa | 2094 |
| 1659431 | | | | | |
| AD- | AGT | ususagugucUfUfGfaauguaagauL96 | 1746 | asdTscudTadCauucdAaGfacacuaasasu | 2095 |
| 1659432 | | | | | |
| AD- | AGT | usasgugucuUfGfAfauguaagaauL96 | 1747 | asdTsucdTudAcauudCaAfgacacuasasa | 2096 |
| 1659433 | | | | | |
| AD- | AGT | asgsugucuuGfAfAfuguaagaacuL96 | 1748 | asdGsuudCudTacaudTcAfagacacusasa | 2097 |
| 1659434 | | | | | |
| AD- | AGT | usgsucuugaAfUfGfuaagaacauuL96 | 1749 | asdAsugdTudCuuacdAuUfcaagacascsu | 2098 |
| 1659436 | | | | | |
| AD- | AGT | gsuscuugaaUfGfUfaagaacauguL96 | 1750 | asdCsaudGudTcuuadCaUfucaagacsasc | 2099 |
| 1659437 | | | | | |
| AD- | AGT | ususgaauguAfAfGfaacaugaccuL96 | 1751 | asdGsgudCadTguucdTuAfcauucaasgsa | 2100 |
| 1659440 | | | | | |
| AD- | AGT | gsusaagaacAfUfGfaccuccguguL96 | 1752 | asdCsacdGgdAggucdAuGfuucuuacsasu | 2101 |
| 1659446 | | | | | |
| AD- | AGT | usasagaacaUfGfAfccuccguguuL96 | 1753 | asdAscadCgdGaggudCaUfguucuuascsa | 2102 |
| 1659447 | | | | | |
| AD- | AGT | asasgaacauGfAfCfcuccguguauL96 | 1754 | asdTsacdAcdGgaggdTcAfuguucuusasc | 2103 |
| 1659448 | | | | | |
| AD- | AGT | asgsaacaugAfCfCfuccguguaguL96 | 1755 | asdCsuadCadCggagdGuCfauguucususa | 2104 |
| 1659449 | | | | | |
| AD- | AGT | gsasacaugaCfCfUfccguguaguuL96 | 1756 | asdAscudAcdAcggadGgUfcauguucsusu | 2105 |
| 1659450 | | | | | |
| AD- | AGT | asascaugacCfUfCfcguguaguguL96 | 1757 | asdCsacdTadCacggdAgGfucauguuscsu | 2106 |
| 1659451 | | | | | |
| AD- | AGT | ascsaugaccUfCfCfguguaguguuL96 | 1758 | asdAscadCudAcacgdGaGfgucaugususc | 2107 |
| 1659452 | | | | | |
| AD- | AGT | csasugaccuCfCfGfuguagugucuL96 | 1759 | asdGsacdAcdTacacdGgAfggucaugsusu | 2108 |
| 1659453 | | | | | |
| AD- | AGT | asusgaccucCfGfUfguagugucuuL96 | 1760 | asdAsgadCadCuacadCgGfaggucausgsu | 2109 |
| 1659454 | | | | | |
| AD- | AGT | csusuaguuuUfUfUfccacagauguL96 | 1761 | asdCsaudCudGuggadAaAfaacuaagsgsu | 2110 |
| 1659481 | | | | | |
| AD- | AGT | ususaguuuuUfUfCfcacagaugcuL96 | 1762 | asdGscadTcdTguggdAaAfaaacuaasgsg | 2111 |
| 1659482 | | | | | |
| AD- | AGT | usasguuuuuUfCfCfacagaugcuuL96 | 1763 | asdAsgcdAudCugugdGaAfaaaacuasasg | 2112 |
| 1659483 | | | | | |
| AD- | AGT | gsusuuuuucCfAfCfagaugcuuguL96 | 1764 | asdCsaadGcdAucugdTgGfaaaaaacsusa | 2113 |
| 1659485 | | | | | |
| AD- | AGT | ususuuuccaCfAfGfaugcuuguguL96 | 1765 | asdCsacdAadGcaucdTgUfggaaaaasasc | 2114 |
| 1659487 | | | | | |
| AD- | AGT | ususuuccacAfGfAfugcuugugauL96 | 1766 | asdTscadCadAgcaudCuGfuggaaaasasa | 2115 |
| 1659488 | | | | | |
| AD- | AGT | ususuccacaGfAfUfgcuugugauuL96 | 1767 | asdAsucdAcdAagcadTcUfguggaaasasa | 2116 |
| 1659489 | | | | | |
| AD- | AGT | ususccacagAfUfGfcuugugauuuL96 | 1768 | asdAsaudCadCaagcdAuCfuguggaasasa | 2117 |
| 1659490 | | | | | |
| AD- | AGT | uscscacagaUfGfCfuugugauuuuL96 | 1769 | asdAsaadTcdAcaagdCaUfcuguggasasa | 2118 |
| 1659491 | | | | | |
| AD- | AGT | cscsacagauGfCfUfugugauuuuuL96 | 1770 | asdAsaadAudCacaadGcAfucuguggsasa | 2119 |
| 1659492 | | | | | |
| AD- | AGT | csascagaugCfUfUfgugauuuuuuL96 | 1771 | asdAsaadAadTcacadAgCfaucugugsgsa | 2120 |
| 1659493 | | | | | |
| AD- | AGT | ascscugaauUfUfCfuguuugaauuL96 | 1772 | asdAsuudCadAacagdAaAfuucaggusgsc | 2121 |
| 1659537 | | | | | |
| AD- | AGT | cscsugaauuUfCfUfguuugaauguL96 | 1773 | asdCsaudTcdAaacadGaAfauucaggsusg | 2122 |
| 1659538 | | | | | |
| AD- | AGT | gsgsaaccauAfGfCfugguuauuuuL96 | 1774 | asdAsaadTadAccagdCuAfugguuccsgsc | 2123 |
| 1659559 | | | | | |
| AD- | AGT | gsasaccauaGfCfUfgguuauuucuL96 | 1775 | asdGsaadAudAaccadGcUfaugguucscsg | 2124 |
| 1659560 | | | | | |
| AD- | AGT | asasccauagCfUfGfguuauuucuuL96 | 1776 | asdAsgadAadTaaccdAgCfuaugguuscsc | 2125 |
| 1659561 | | | | | |
| AD- | AGT | ascscauagcUfGfGfuuauuucucuL96 | 1777 | asdGsagdAadAuaacdCaGfcuauggususc | 2126 |
| 1659562 | | | | | |
| AD- | AGT | cscsauagcuGfGfUfuauuucuccuL96 | 1778 | asdGsgadGadAauaadCcAfgcuauggsusu | 2127 |
| 1659563 | | | | | |
| AD- | AGT | cscsuuguguUfAfGfuaauaaacguL96 | 1779 | asdCsgudTudAuuacdTaAfcacaaggsgsa | 2128 |
| 1659582 | | | | | |
| AD- | AGT | csusuguguuAfGfUfaauaaacguuL96 | 1780 | asdAscgdTudTauuadCuAfacacaagsgsg | 2129 |
| 1659583 | | | | | |
| AD- | AGT | ususguguuaGfUfAfauaaacgucuL96 | 1781 | asdGsacdGudTuauudAcUfaacacaasgsg | 2130 |
| 1659584 | | | | | |
| AD- | AGT | usgsuguuagUfAfAfuaaacgucuuL96 | 1782 | asdAsgadCgdTuuaudTaCfuaacacasasg | 2131 |
| 1659585 | | | | | |
| AD- | AGT | gsusguuaguAfAfUfaaacgucuuuL96 | 1783 | asdAsagdAcdGuuuadTuAfcuaacacsasa | 2132 |
| 1659586 | | | | | |
| AD- | AGT | usgsuuaguaAfUfAfaacgucuuguL96 | 1784 | asdCsaadGadCguuudAuUfacuaacascsa | 2133 |
| 1659587 | | | | | |
| AD- | AGT | gsusuaguaaUfAfAfacgucuugcuL96 | 1785 | asdGscadAgdAcguudTaUfuacuaacsasc | 2134 |
| 1659588 | | | | | |

[0435] In some embodiments, the dsRNA molecule is not a dsRNA molecule listed in Table 7.

TABLE 7
Additional dsRNA molecules

| | | SEQ | | SEQ |
|---|---|---|---|---|
| Duplex | | ID | | ID |
| ID | Sense sequence (5′→3′) | NO: | Antisense sequence (5′→3′) | NO: |
| AD- | cscsgcu(Chd)agGfUfUfcugcuuuuaaL96 | 2135 | VPusdTsaadAadGcagadAcCfudGagcggscsc | 2136 |
| 1289862.1 | | | | |
| AD- | uscsugagCfuGfAfGfuugguuuuauL96 | 193 | asdTsaadAadCcaacdTcdAgdCucagasgsg | 2137 |
| 1193318.1 | | | | |
| AD- | uscsugagCfuGfAfGfuugguuuuauL96 | 193 | asdTsaadAadCcaacdTcdAgdCucagascsc | 2138 |
| 1193320.1 | | | | |
| AD- | ususuuagAfaCfAfCfcuuuuucacuL96 | 235 | asdGsugdAadAaaggdTgUfuCfuaaaasusu | 2139 |
| 1193410.1 | | | | |
| AD- | ususuuagAfaCfAfCfcuuuuucacuL96 | 235 | asdGsugdAadAaaggdTgUfuCfuaaaascsc | 2140 |
| 1193413.1 | | | | |

Total RNA isolation using DYNABEADS mRNA Isolation Kit (Invitrogen™, part #: 610-12)

[0436] Cells were lysed in 75 μL of Lysis/Binding Buffer containing 3 μL of beads per well and mixed for 10 minutes on an electrostatic shaker. The washing steps were automated on a Biotek EL406, using a magnetic plate support. Beads were washed (in 90 μL) once in Buffer A, once in Buffer B, and twice in Buffer E, with aspiration steps in between. Following a final aspiration, complete 10 μL RT mixture was added to each well, as described below.

Cdna Synthesis Using ABI High Capacity cDNA Reverse Transcription Kit (Applied Biosystems, Foster City, CA, Cat #4368813)

[0437] A master mix of 1 μL 10× Buffer, 0.4 μL 25× dNTPs, 1 μL Random primers, 0.5 L Reverse Transcriptase, 0.5 μL RNase inhibitor and 6.6 μL of H₂O per reaction were added per well. Plates were sealed, agitated for 10 minutes on an electrostatic shaker, and then incubated at 37° C. for 2 hours. Following this, the plates were agitated at 80° C. for 8 minutes

### Real Time PCR

[0438] Two μL of cDNA were added to a master mix containing 0.5 μL of human GAPDH TaqMan Probe (4326317E), 0.5 μL human AGT (HsO0174854 ml), 2 μL nuclease-free water and 5 μL Lightcycler 480 probe master mix (Roche Cat #O4887301001) per well in a 384 well plates (Roche cat #O4887301001). Real time PCR was done in a LightCycler480 Real Time PCR system (Roche).

[0439] To calculate relative fold change, data were analyzed using the ΔΔCt method and normalized to assays performed with cells transfected with 10 nM AD-1955, or mock transfected cells.

[0440] Results are shown in FIGS. 1A-1B and 3A-4C and summarized in Tables 8-14. The results show a consistently improved in vitro activity relative to the parent design across several exemplary designs and across a large set of exemplary sequences, targets, and cell lines.

TABLE 8
In vitro activity for various designs in primary mouse hepatocytes

| Parent | | | | | | | | | | | | |
|---|---|---|---|---|---|---|---|---|---|---|---|---|
| Duplex ID | Dose | | Parent | StDev | AS5-7 | StDev | AS14 | StDev | 2015 | StDev | D1 | StDev |
| AD-1181392 | 10 | nM | 4.2 | 0.5 | 4.9 | 0.3 | 5.6 | 0.5 | 4.7 | 0.6 | 4.4 | 0.3 |
| AD-1181401 | | | 7.4 | 1.0 | 5.9 | 1.2 | 10.9 | 3.2 | 6.1 | 0.5 | 4.6 | 0.2 |
| AD-1181410 | | | 5.8 | 0.3 | 4.4 | 0.5 | 5.8 | 0.9 | 6.1 | 1.1 | 6.0 | 0.7 |
| AD-1181417 | | | 5.8 | 0.8 | 6.1 | 1.8 | 8.1 | 1.9 | 10.1 | 2.3 | 6.3 | 1.4 |
| AD-1181426 | | | 6.2 | 1.5 | 6.4 | 0.2 | 5.3 | 0.7 | 6.4 | 0.6 | 4.2 | 0.7 |
| AD-64972 | | | 5.6 | 0.9 | 5.2 | 0.6 | 5.7 | 1.7 | 7.7 | 0.7 | 4.9 | 1.1 |
| AD-1181443 | | | 5.3 | 0.4 | 4.7 | 1.0 | 6.6 | 0.4 | 3.8 | 0.7 | 4.6 | 0.6 |
| AD-1181451 | | | 6.3 | 1.0 | 4.2 | 0.2 | 5.4 | 0.4 | 6.7 | 1.0 | 5.8 | 0.7 |
| AD-1181460 | | | 5.5 | 0.7 | 5.4 | 0.5 | 7.5 | 0.4 | 7.5 | 0.5 | 5.6 | 0.8 |
| AD-1181469 | | | 11.2 | 1.8 | 8.2 | 1.8 | 10.3 | 2.8 | 8.0 | 1.3 | 7.1 | 0.8 |
| AD-674282 | | | 5.3 | 4.9 | 10.9 | 0.9 | | | | | 27.0 | 10.3 |
| AD-674283 | | | 1.3 | 0.4 | 2.2 | 0.3 | | | | | 1.4 | 0.4 |
| AD-674287 | | | 4.1 | 1.2 | 4.5 | 0.7 | | | | | 12.4 | 2.0 |
| AD-674289 | | | 9.2 | 6.3 | 11.8 | 2.0 | | | | | 14.0 | 2.8 |
| AD-674293 | | | 3.1 | 3.4 | 7.7 | 1.7 | | | | | 11.0 | 3.8 |
| AD-674299 | | | 1.5 | 1.0 | 2.4 | 1.4 | | | | | 3.2 | 0.7 |
| AD-674303 | | | 29.5 | 6.4 | 26.3 | 4.4 | | | | | 29.3 | 4.6 |
| AD-674305 | | | 2.1 | 1.7 | 5.5 | 2.3 | | | | | 6.0 | 2.7 |
| AD-674307 | | | 2.9 | 3.0 | 2.3 | 1.0 | | | | | 3.1 | 0.2 |
| AD-674310 | | | 4.8 | 0.9 | 2.9 | 1.0 | | | | | 5.5 | 2.6 |
| AD-674312 | | | 6.3 | 3.7 | 4.0 | 1.4 | | | | | 5.0 | 2.3 |
| AD-674314 | | | 16.8 | 2.9 | 19.8 | 6.0 | | | | | 21.1 | 9.3 |
| AD-674323 | | | 21.4 | 5.9 | 16.0 | 1.9 | | | | | 30.8 | 6.8 |
| AD-674325 | | | 14.4 | 2.6 | 13.8 | 0.7 | | | | | 17.9 | 2.8 |
| AD-68435 | | | 4.2 | 2.0 | 1.9 | 0.5 | | | | | 4.9 | 1.4 |
| AD-1181392 | 1 | nM | 2.8 | 0.2 | 2.9 | 0.3 | 3.0 | 0.2 | 2.3 | 0.2 | 3.0 | 0.2 |
| AD-1181401 | | | 8.9 | 1.6 | 3.9 | 0.3 | 18.3 | 3.8 | 6.5 | 0.6 | 3.6 | 0.1 |
| AD-1181410 | | | 3.8 | 0.4 | 3.5 | 0.2 | 3.8 | 0.1 | 3.7 | 0.5 | 3.6 | 0.3 |
| AD-1181417 | | | 11.5 | 2.0 | 7.7 | 0.8 | 17.1 | 1.9 | 10.5 | 1.4 | 4.2 | 1.0 |
| AD-1181426 | | | 3.6 | 0.4 | 3.7 | 0.6 | 3.9 | 0.4 | 4.7 | 0.6 | 2.7 | 0.3 |
| AD-64972 | | | 5.3 | 0.5 | 4.3 | 0.4 | 10.8 | 2.5 | 8.6 | 2.2 | 4.6 | 0.7 |
| AD-1181443 | | | 4.5 | 0.5 | 4.7 | 1.1 | 6.5 | 1.3 | 3.4 | 0.5 | 3.3 | 0.4 |
| AD-1181451 | | | 10.8 | 1.9 | 9.9 | 1.5 | 17.2 | 3.0 | 10.2 | 2.3 | 6.8 | 1.1 |
| AD-1181460 | | | 18.7 | 2.0 | 4.1 | 0.5 | 35.5 | 1.9 | 19.9 | 2.0 | 4.5 | 0.6 |
| AD-1181469 | | | 33.5 | 3.1 | 13.1 | 2.4 | 68.6 | 2.5 | 44.9 | 1.6 | 16.5 | 1.5 |
| AD-674282 | | | 11.5 | 11.6 | 15.9 | 6.3 | | | | | 16.5 | 4.0 |
| AD-674283 | | | 11.8 | 6.2 | 5.2 | 1.6 | | | | | 3.5 | 0.4 |
| AD-674287 | | | 14.8 | 2.2 | 7.3 | 2.1 | | | | | 12.4 | 2.4 |
| AD-674289 | | | 67.0 | 11.6 | 29.3 | 6.8 | | | | | 19.0 | 4.5 |
| AD-674293 | | | 30.4 | 9.4 | 17.7 | 2.8 | | | | | 9.1 | 1.0 |
| AD-674299 | | | 16.0 | 4.4 | 7.7 | 1.4 | | | | | 4.4 | 1.2 |
| AD-674303 | | | 87.2 | 4.5 | 42.6 | 5.9 | | | | | 39.1 | 4.4 |
| AD-674305 | | | 28.8 | 8.2 | 8.5 | 1.5 | | | | | 6.7 | 1.4 |
| AD-674307 | | | 15.9 | 2.0 | 3.5 | 1.4 | | | | | 2.4 | 1.3 |
| AD-674310 | | | 18.7 | 4.5 | 5.9 | 1.9 | | | | | 4.8 | 2.4 |
| AD-674312 | | | 29.1 | 5.0 | 15.1 | 5.2 | | | | | 6.3 | 2.0 |
| AD-674314 | | | 36.5 | 9.1 | 20.1 | 6.3 | | | | | 15.9 | 3.2 |
| AD-674323 | | | 63.6 | 7.5 | 18.7 | 4.2 | | | | | 14.5 | 4.2 |
| AD-674325 | | | 36.9 | 6.4 | 16.1 | 2.5 | | | | | 11.4 | 1.7 |
| AD-68435 | | | 14.9 | 1.7 | 4.5 | 0.8 | | | | | 4.0 | 0.9 |
| AD-674282 | 0.1 | nM | 3.5 | 2.0 | 17.6 | 3.4 | | | | | 31.5 | 8.3 |
| AD-674283 | | | 5.9 | 2.9 | 9.7 | 3.5 | | | | | 7.5 | 1.5 |
| AD-674287 | | | 13.4 | 7.8 | 14.7 | 4.8 | | | | | 34.3 | 15.5 |
| AD-674289 | | | 53.5 | 6.6 | 42.0 | 7.3 | | | | | 52.0 | 16.3 |
| AD-674293 | | | 22.9 | 1.1 | 30.2 | 4.6 | | | | | 42.9 | 5.5 |
| AD-674299 | | | 13.5 | 4.3 | 9.3 | 1.3 | | | | | 17.9 | 7.1 |
| AD-674303 | | | 57.4 | 5.9 | 64.5 | 11.7 | | | | | 67.7 | 11.8 |
| AD-674305 | | | 25.7 | 4.9 | 15.2 | 7.6 | | | | | 32.2 | 11.3 |
| AD-674307 | | | 14.8 | 1.4 | 5.9 | 0.4 | | | | | 17.2 | 2.0 |
| AD-674310 | | | 23.3 | 11.8 | 13.7 | 3.8 | | | | | 33.6 | 7.0 |
| AD-674312 | | | 35.9 | 12.0 | 27.0 | 4.5 | | | | | 29.8 | 9.4 |
| AD-674314 | | | 34.9 | 2.5 | 41.3 | 10.2 | | | | | 60.8 | 9.8 |
| AD-674323 | | | 70.3 | 6.8 | 46.4 | 13.8 | | | | | 77.4 | 1.8 |
| AD-674325 | | | 28.8 | 2.4 | 32.1 | 11.7 | | | | | 51.6 | 10.9 |
| AD-68435 | | | 15.8 | 2.4 | 9.2 | 4.8 | | | | | 46.3 | 16.4 |

TABLE 9
In vitro activity for various designs in primary mouse hepatocytes

| Parent | | | | | | | | | | | | |
|---|---|---|---|---|---|---|---|---|---|---|---|---|
| Duplex ID | Dose | | Parent | StDev | D2 | StDev | D3 | StDev | D4 | StDev | v2 | StDev |
| AD-1181392 | 10 | nM | 4.2 | 0.5 | 5.0 | 0.1 | 9.1 | 1.2 | 9.6 | 0.3 | 7.0 | 0.4 |
| AD-1181401 | | | 7.4 | 1.0 | 6.2 | 1.8 | 8.2 | 0.8 | 7.8 | 1.2 | 7.4 | 0.5 |
| AD-1181410 | | | 5.8 | 0.3 | 4.7 | 0.2 | 5.8 | 0.8 | 7.5 | 0.2 | 5.7 | 1.5 |
| AD-1181417 | | | 5.8 | 0.8 | 5.0 | 1.4 | 11.8 | 2.1 | 12.1 | 1.5 | 8.6 | 0.6 |
| AD-1181426 | | | 6.2 | 1.5 | 5.9 | 0.8 | 5.9 | 0.8 | 9.0 | 2.1 | 7.2 | 1.8 |
| AD-64972 | | | 5.6 | 0.9 | 5.9 | 1.1 | 7.8 | 1.7 | 10.5 | 0.8 | 13.0 | 0.5 |
| AD-1181443 | | | 5.3 | 0.4 | 6.0 | 1.4 | 6.8 | 0.5 | 4.0 | 0.5 | 5.2 | 0.3 |
| AD-1181451 | | | 6.3 | 1.0 | 4.9 | 0.5 | 8.8 | 4.9 | 7.6 | 0.6 | 7.2 | 0.3 |
| AD-1181460 | | | 5.5 | 0.7 | 6.0 | 0.7 | 8.9 | 1.1 | 12.4 | 3.3 | 10.7 | 2.0 |
| AD-1181469 | | | 11.2 | 1.8 | 6.0 | 1.2 | 7.6 | 1.2 | 9.9 | 2.3 | 18.3 | 5.2 |
| AD-674282 | | | 5.3 | 4.9 | | | | | | | | |
| AD-674283 | | | 1.3 | 0.4 | | | | | | | | |
| AD-674287 | | | 4.1 | 1.2 | | | | | | | | |
| AD-674289 | | | 9.2 | 6.3 | | | | | | | | |
| AD-674293 | | | 3.1 | 3.4 | | | | | | | | |
| AD-674299 | | | 1.5 | 1.0 | | | | | | | | |
| AD-674303 | | | 29.5 | 6.4 | | | | | | | | |
| AD-674305 | | | 2.1 | 1.7 | | | | | | | | |
| AD-674307 | | | 2.9 | 3.0 | | | | | | | | |
| AD-674310 | | | 4.8 | 0.9 | | | | | | | | |
| AD-674312 | | | 6.3 | 3.7 | | | | | | | | |
| AD-674314 | | | 16.8 | 2.9 | | | | | | | | |
| AD-674323 | | | 21.4 | 5.9 | | | | | | | | |
| AD-674325 | | | 14.4 | 2.6 | | | | | | | | |
| AD-68435 | | | 4.2 | 2.0 | | | | | | | | |
| AD-1181392 | 1 | nM | 2.8 | 0.2 | 2.9 | 0.1 | 5.7 | 0.7 | 9.7 | 0.6 | 4.1 | 0.4 |
| AD-1181401 | | | 8.9 | 1.6 | 4.6 | 0.8 | 6.6 | 0.5 | 7.8 | 0.4 | 5.0 | 0.2 |
| AD-1181410 | | | 3.8 | 0.4 | 3.0 | 0.2 | 3.6 | 0.7 | 3.4 | 0.9 | 4.2 | 0.4 |
| AD-1181417 | | | 11.5 | 2.0 | 4.3 | 0.5 | 8.3 | 1.2 | 43.7 | 5.6 | 17.7 | 4.3 |
| AD-1181426 | | | 3.6 | 0.4 | 2.8 | 0.5 | 5.3 | 0.6 | 14.5 | 3.2 | 5.3 | 0.4 |
| AD-64972 | | | 5.3 | 0.5 | 5.4 | 2.3 | 8.3 | 0.8 | 17.7 | 1.1 | 19.3 | 1.5 |
| AD-1181443 | | | 4.5 | 0.5 | 4.5 | 0.5 | 5.4 | 0.3 | 4.0 | 0.5 | 4.9 | 0.8 |
| AD-1181451 | | | 10.8 | 1.9 | 18.0 | 5.2 | 11.1 | 0.2 | 11.0 | 1.0 | 34.9 | 3.8 |
| AD-1181460 | | | 18.7 | 2.0 | 5.9 | 0.7 | 17.6 | 2.0 | 38.2 | 6.6 | 22.1 | 2.6 |
| AD-1181469 | | | 33.5 | 3.1 | 21.2 | 0.9 | 33.8 | 0.8 | 56.1 | 2.2 | 74.3 | 5.8 |
| AD-674282 | | | 11.5 | 11.6 | | | | | | | | |
| AD-674283 | | | 11.8 | 6.2 | | | | | | | | |
| AD-674287 | | | 14.8 | 2.2 | | | | | | | | |
| AD-674289 | | | 67.0 | 11.6 | | | | | | | | |
| AD-674293 | | | 30.4 | 9.4 | | | | | | | | |
| AD-674299 | | | 16.0 | 4.4 | | | | | | | | |
| AD-674303 | | | 87.2 | 4.5 | | | | | | | | |
| AD-674305 | | | 28.8 | 8.2 | | | | | | | | |
| AD-674307 | | | 15.9 | 2.0 | | | | | | | | |
| AD-674310 | | | 18.7 | 4.5 | | | | | | | | |
| AD-674312 | | | 29.1 | 5.0 | | | | | | | | |
| AD-674314 | | | 36.5 | 9.1 | | | | | | | | |
| AD-674323 | | | 63.6 | 7.5 | | | | | | | | |
| AD-674325 | | | 36.9 | 6.4 | | | | | | | | |
| AD-68435 | | | 14.9 | 1.7 | | | | | | | | |
| AD-674282 | 0.1 | nM | 3.5 | 2.0 | | | | | | | | |
| AD-674283 | | | 5.9 | 2.9 | | | | | | | | |
| AD-674287 | | | 13.4 | 7.8 | | | | | | | | |
| AD-674289 | | | 53.5 | 6.6 | | | | | | | | |
| AD-674293 | | | 22.9 | 1.1 | | | | | | | | |
| AD-674299 | | | 13.5 | 4.3 | | | | | | | | |
| AD-674303 | | | 57.4 | 5.9 | | | | | | | | |
| AD-674305 | | | 25.7 | 4.9 | | | | | | | | |
| AD-674307 | | | 14.8 | 1.4 | | | | | | | | |
| AD-674310 | | | 23.3 | 11.8 | | | | | | | | |
| AD-674312 | | | 35.9 | 12.0 | | | | | | | | |
| AD-674314 | | | 34.9 | 2.5 | | | | | | | | |
| AD-674323 | | | 70.3 | 6.8 | | | | | | | | |
| AD-674325 | | | 28.8 | 2.4 | | | | | | | | |
| AD-68435 | | | 15.8 | 2.4 | | | | | | | | |

TABLE 10
In vitro activity for various designs in primary mouse hepatocytes

| Parent | | | | | | | | | | | | |
|---|---|---|---|---|---|---|---|---|---|---|---|---|
| Duplex ID | Dose | | Parent | StDev | D1 | StDev | D5 | StDev | D6 | StDev | D7 | StDev |
| AD-1181392 | 10 | nM | 1.2 | 0.1 | 0.9 | 0.1 | 1.8 | 0.3 | 8.6 | 1.2 | 2.8 | 0.3 |
| AD-1181401 | | | 24.2 | 2.3 | 4.5 | 1.1 | 7.4 | 1.1 | 19.1 | 1.1 | 8.5 | 2.1 |
| AD-1181410 | | | 5.3 | 1.9 | 1.7 | 0.4 | 2.2 | 0.5 | 3.5 | 1.2 | 2.5 | 0.3 |
| AD-1181417 | | | 15.4 | 3.6 | 5.5 | 1.6 | 9.8 | 2.6 | 59.8 | 21.7 | 13.6 | 4.3 |
| AD-1181426 | | | 2.6 | 0.6 | 1.4 | 0.3 | 4.5 | 0.7 | 9.7 | 1.5 | 4.7 | 1.1 |
| AD-64972 | | | 12.1 | 2.9 | 5.0 | 1.4 | 9.4 | 2.5 | 15.0 | 5.1 | 11.8 | 1.8 |
| AD-1181443 | | | 4.0 | 0.5 | 1.5 | 0.6 | 5.1 | 1.0 | 10.8 | 2.0 | 5.5 | 0.3 |
| AD-1181451 | | | 13.1 | 0.7 | 6.3 | 1.4 | 13.9 | 1.8 | 17.2 | 2.0 | 14.8 | 1.9 |
| AD-1181460 | | | 22.6 | 4.7 | 3.0 | 0.5 | 4.9 | 0.2 | 16.4 | 1.8 | 7.7 | 1.1 |
| AD-1181392 | 1 | nM | 5.5 | 0.5 | 3.7 | 0.2 | 7.0 | 2.1 | 22.7 | 4.9 | 10.9 | 2.5 |
| AD-1181401 | | | 47.8 | 13.8 | 15.0 | 2.9 | 18.6 | 4.6 | 39.1 | 2.5 | 17.9 | 1.3 |
| AD-1181410 | | | 16.7 | 2.9 | 9.2 | 1.3 | 8.9 | 0.9 | 12.0 | 3.2 | 14.0 | 2.3 |
| AD-1181417 | | | 49.0 | 14.9 | 27.9 | 3.2 | 42.6 | 9.8 | 88.7 | 11.6 | 34.8 | 7.4 |
| AD-1181426 | | | 15.8 | 3.8 | 8.1 | 0.8 | 8.6 | 3.5 | 20.5 | 2.6 | 12.0 | 2.9 |
| AD-64972 | | | 39.9 | 6.4 | 17.9 | 2.7 | 32.0 | 8.5 | 36.2 | 8.5 | 31.2 | 6.0 |
| AD-1181443 | | | 16.9 | 2.3 | 9.5 | 4.1 | 21.4 | 4.0 | 28.3 | 4.3 | 20.8 | 4.2 |
| AD-1181451 | | | 44.9 | 3.3 | 31.9 | 9.0 | 49.0 | 6.0 | 53.4 | 6.9 | 43.3 | 4.4 |
| AD-1181460 | | | 74.8 | 15.4 | 23.9 | 0.7 | 23.7 | 0.8 | 46.7 | 6.7 | 28.4 | 6.8 |
| AD-1181392 | 0.1 | nM | 23.5 | 1.4 | 18.7 | 1.4 | 26.1 | 7.9 | 56.7 | 7.6 | 27.7 | 3.2 |
| AD-1181401 | | | 61.8 | 6.4 | 33.9 | 3.7 | 37.7 | 4.1 | 75.4 | 15.2 | 45.9 | 8.7 |
| AD-1181410 | | | 48.7 | 4.0 | 28.3 | 3.9 | 20.9 | 1.8 | 32.0 | 2.3 | 35.5 | 7.8 |
| AD-1181417 | | | 62.5 | 7.4 | 56.2 | 14.9 | 88.6 | 13.4 | 132.8 | 33.8 | 84.7 | 22.3 |
| AD-1181426 | | | 71.0 | 16.7 | 53.9 | 4.2 | 46.1 | 17.4 | 136.9 | 20.8 | 69.9 | 16.6 |
| AD-64972 | | | 153.9 | 12.2 | 94.2 | 14.1 | 108.8 | 22.1 | 56.3 | 2.6 | 54.8 | 13.3 |
| AD-1181443 | | | 80.2 | 5.8 | 20.2 | 2.4 | 42.0 | 2.4 | 45.0 | 9.6 | 34.3 | 5.8 |
| AD-1181451 | | | 69.6 | 6.4 | 58.7 | 7.8 | 71.2 | 9.0 | 80.8 | 25.3 | 65.2 | 10.0 |
| AD-1181460 | | | 72.3 | 4.0 | 44.3 | 5.7 | 48.3 | 2.9 | 53.6 | 7.2 | 51.1 | 1.9 |

TABLE 11
In vitro activity for various designs in primary mouse hepatocytes

| Parent | | | | | | | | | | | | | | |
|---|---|---|---|---|---|---|---|---|---|---|---|---|---|---|
| Duplex ID | Dose | | Parent | StDev | D8 | StDev | D9 | StDev | D10 | StDev | D11 | StDev | D12 | StDev |
| AD-1181392 | 10 | nM | 1.2 | 0.1 | 11.0 | 2.4 | 9.3 | 1.7 | 4.7 | 0.7 | 10.5 | 3.0 | 14.7 | 2.5 |
| AD-1181401 | | | 24.2 | 2.3 | 21.5 | 3.2 | 13.6 | 2.6 | 11.4 | 2.0 | 24.1 | 3.0 | 23.4 | 3.6 |
| AD-1181410 | | | 5.3 | 1.9 | 3.0 | 0.3 | 4.3 | 0.6 | 3.6 | 0.7 | 10.5 | 3.6 | 5.7 | 1.7 |
| AD-1181417 | | | 15.4 | 3.6 | 48.9 | 10.6 | 48.8 | 13.3 | 23.4 | 11.8 | 54.9 | 16.4 | 53.8 | 6.7 |
| AD-1181426 | | | 2.6 | 0.6 | 10.7 | 3.6 | 6.1 | 1.3 | 6.9 | 2.2 | 21.0 | 5.4 | 18.3 | 4.6 |
| AD-64972 | | | 12.1 | 2.9 | 13.7 | 3.1 | 13.4 | 4.4 | 15.1 | 5.6 | 27.0 | 5.7 | 30.5 | 3.6 |
| AD-1181443 | | | 4.0 | 0.5 | 11.4 | 3.1 | 9.2 | 1.8 | 6.9 | 1.0 | 16.8 | 3.9 | 14.9 | 3.3 |
| AD-1181451 | | | 13.1 | 0.7 | 19.6 | 3.2 | 20.4 | 4.1 | 15.2 | 3.3 | 30.9 | 3.4 | 39.0 | 6.9 |
| AD-1181460 | | | 22.6 | 4.7 | 24.3 | 5.2 | 23.0 | 2.8 | 15.0 | 1.8 | 35.8 | 3.9 | 47.1 | 2.6 |
| AD-1181392 | 1 | nM | 5.5 | 0.5 | 29.8 | 1.0 | 27.1 | 3.3 | 12.6 | 0.9 | 28.1 | 8.1 | 32.2 | 3.7 |
| AD-1181401 | | | 47.8 | 13.8 | 44.7 | 5.3 | 30.3 | 4.6 | 29.8 | 6.7 | 43.3 | 0.4 | 48.2 | 11.0 |
| AD-1181410 | | | 16.7 | 2.9 | 13.2 | 1.4 | 15.2 | 4.2 | 12.4 | 3.0 | 24.2 | 6.3 | 16.2 | 2.3 |
| AD-1181417 | | | 49.0 | 14.9 | 68.4 | 6.6 | 74.2 | 16.5 | 40.2 | 5.1 | 76.1 | 7.5 | 109.0 | 13.3 |
| AD-1181426 | | | 15.8 | 3.8 | 30.7 | 9.4 | 20.1 | 2.9 | 19.6 | 6.0 | 41.7 | 3.8 | 30.4 | 7.2 |
| AD-64972 | | | 39.9 | 6.4 | 33.8 | 5.9 | 41.3 | 5.1 | 34.7 | 8.0 | 62.8 | 3.6 | 62.5 | 7.1 |
| AD-1181443 | | | 16.9 | 2.3 | 34.9 | 4.2 | 28.8 | 5.8 | 23.2 | 6.5 | 45.6 | 11.2 | 39.0 | 3.7 |
| AD-1181451 | | | 44.9 | 3.3 | 66.8 | 4.3 | 62.9 | 15.2 | 55.0 | 13.0 | 76.2 | 10.5 | 82.0 | 19.4 |
| AD-1181460 | | | 74.8 | 15.4 | 70.3 | 13.8 | 49.4 | 6.2 | 50.2 | 7.3 | 77.5 | 9.4 | 79.8 | 13.4 |
| AD-1181392 | 0.1 | nM | 23.5 | 1.4 | 54.1 | 10.4 | 47.7 | 2.3 | 28.9 | 1.1 | 49.2 | 3.2 | 54.4 | 2.2 |
| AD-1181401 | | | 61.8 | 6.4 | 60.0 | 5.6 | 47.9 | 5.6 | 51.8 | 7.7 | 66.5 | 6.4 | 68.6 | 2.0 |
| AD-1181410 | | | 48.7 | 4.0 | 36.9 | 4.3 | 34.1 | 7.6 | 33.4 | 1.8 | 62.0 | 9.3 | 43.6 | 6.5 |
| AD-1181417 | | | 62.5 | 7.4 | 160.5 | 30.4 | 98.3 | 27.8 | 118.4 | 35.9 | 76.4 | 7.7 | 110.2 | 13.7 |
| AD-1181426 | | | 71.0 | 16.7 | 46.9 | 6.8 | 48.4 | 12.4 | 77.7 | 25.4 | 107.5 | 28.7 | 88.3 | 36.8 |
| AD-64972 | | | 153.9 | 12.2 | 55.6 | 11.8 | 68.1 | 24.6 | 69.6 | 22.2 | 130.8 | 26.1 | 123.2 | 18.6 |
| AD-1181443 | | | 80.2 | 5.8 | 60.7 | 9.7 | 63.6 | 8.4 | 46.4 | 5.7 | 56.6 | 7.5 | 58.8 | 1.6 |
| AD-1181451 | | | 69.6 | 6.4 | 53.8 | 2.3 | 60.8 | 1.8 | 51.2 | 1.0 | 68.4 | 8.3 | 77.0 | 4.5 |
| AD-1181460 | | | 72.3 | 4.0 | 64.1 | 9.0 | 71.2 | 3.6 | 64.4 | 3.5 | 68.4 | 3.2 | 68.6 | 3.3 |

TABLE 12
In vitro activity for various designs in primary cynomolgus hepatocytes

| Parent Duplex ID | Dose | | Parent | StDev | D1 | StDev | D2 | StDev |
|---|---|---|---|---|---|---|---|---|
| AD-157464.8 | 10 | nM | 1.0 | 0.0 | 1.0 | 0.3 | 1.2 | 0.3 |
| AD-157448.7 | | | 1.5 | 0.3 | 2.4 | 0.3 | 3.0 | 1.5 |
| AD-157468.11 | | | 2.2 | 1.2 | 1.6 | 0.2 | 1.8 | 0.1 |
| AD-67327.28 | | | 8.3 | 11.8 | 1.7 | 0.5 | 1.8 | 0.1 |
| AD-85446.5 | | | 1.9 | 0.3 | 1.7 | 0.7 | 1.8 | 0.5 |
| AD-85435.13 | | | 2.9 | 0.1 | 2.1 | 0.2 | 1.7 | 0.2 |
| AD-85438.5 | | | 1.7 | 0.3 | 1.2 | 0.1 | 1.8 | 0.1 |
| AD-157464.8 | 1 | nM | 3.0 | 0.6 | 1.4 | 0.4 | 1.6 | 0.4 |
| AD-157448.7 | | | 3.7 | 0.7 | 3.5 | 0.6 | 2.8 | 0.8 |
| AD-157468.11 | | | 5.7 | 0.6 | 4.4 | 0.2 | 3.6 | 0.4 |
| AD-67327.28 | | | 1.6 | 0.0 | 1.9 | 0.1 | 2.2 | 0.2 |
| AD-85446.5 | | | 4.5 | 0.6 | 2.6 | 0.7 | 2.7 | 0.7 |
| AD-85435.13 | | | 6.7 | 0.5 | 2.8 | 0.3 | 2.8 | 0.2 |
| AD-85438.5 | | | 3.5 | 0.1 | 3.2 | 0.5 | 5.9 | 1.0 |
| AD-157464.8 | 0.1 | nM | 10.2 | 0.1 | 1.9 | 0.5 | 2.9 | 0.9 |
| AD-157448.7 | | | 9.0 | 1.0 | 8.9 | 1.7 | 6.9 | 1.0 |
| AD-157468.11 | | | 16.9 | 3.9 | 13.1 | 1.5 | 10.0 | 1.3 |
| AD-67327.28 | | | 4.6 | 0.7 | 3.9 | 0.4 | 4.8 | 0.4 |
| AD-85446.5 | | | 15.9 | 1.5 | 5.9 | 1.1 | 6.8 | 0.6 |
| AD-85435.13 | | | 18.4 | 2.2 | 5.4 | 1.3 | 7.2 | 0.1 |
| AD-85438.5 | | | 10.8 | 1.7 | 10.2 | 2.1 | 14.2 | 2.5 |

TABLE 13
In vitro activity for various designs in Hep3B

| | Parent | | | | D1 | | | |
|---|---|---|---|---|---|---|---|---|
| Target | Duplex ID | 10 nM | 1 nM | 0.1 nM | Duplex ID | 10 nM | 1 nM | 0.1 nM |
| Marc1 | AD-1531684.2 | 8 ± 1.2 | 18.4 ± 3.7 | 12 ± 1.8 | AD-1636769.1 | 6.6 ± 0.8 | 11.4 ± 1.4 | 16.4 ± 1.3 |
| Marc1 | AD-1531719.2 | 26.8 ± 2.8 | 61.9 ± 6.6 | 69 ± 8.4 | AD-1636805.1 | 10.1 ± 1.7 | 32.9 ± 5.2 | 53.2 ± 3.4 |
| Marc1 | AD-1531682.2 | 16.4 ± 2.8 | 42.4 ± 7.2 | 27.3 ± 2.4 | AD-1636782.1 | 11.9 ± 1.1 | 25.9 ± 1.8 | 38.2 ± 5.1 |
| PNPLA3 | AD-75247.4 | 53.6 ± 9 | 88.8 ± 9.5 | 90.3 ± 10.4 | AD-1636754.1 | 52.2 ± 3.3 | 71.2 ± 17.2 | 69.6 ± 13.7 |
| C3 | AD-1531655.2 | 14.3 ± 2.4 | 46 ± 2.2 | 54.8 ± 11.1 | AD-1636695.1 | 14.6 ± 2.4 | 26.6 ± 4.6 | 30.5 ± 3.1 |
| PNPLA3 | AD-67589.6 | 40.1 ± 10.3 | 68.2 ± 16.9 | 57.6 ± 7.6 | AD-1636733.1 | 29.9 ± 4.7 | 31 ± 5 | 37.9 ± 1.7 |
| Marc1 | AD-1531703.2 | 15.4 ± 1.5 | 47.9 ± 2.3 | 54.5 ± 6.6 | AD-1636798.1 | 9 ± 1.8 | 16.6 ± 3.2 | 34.3 ± 3.5 |
| C3 | AD-1531665.2 | 46.4 ± 5.3 | 83.4 ± 12.2 | 94.3 ± 7 | AD-1636720.1 | 35.7 ± 5 | 52.4 ± 3.4 | 71.4 ± 3.5 |
| C3 | AD-1531660.2 | 14.8 ± 4.1 | 39.2 ± 8.6 | 54.6 ± 8.7 | AD-1636701.1 | 13.9 ± 4.4 | 30.3 ± 6.8 | 41.1 ± 4.1 |
| C3 | AD-1531672.2 | 25.6 ± 4.4 | 62.5 ± 3.8 | 82 ± 9.7 | AD-1636716.1 | 19.2 ± 2.9 | 38.5 ± 5.4 | 55.1 ± 2.6 |
| PNPLA3 | AD-1010735.4 | 35.2 ± 8.8 | 55.1 ± 21.7 | 52.6 ± 7.4 | AD-1636729.1 | 48.4 ± 3.4 | 45 ± 4.2 | 56.2 ± 11 |
| Marc1 | AD-1531721.2 | 38.2 ± 4.3 | 61.6 ± 5.7 | 69.9 ± 10.8 | AD-1636806.1 | 16.7 ± 1.1 | 30.4 ± 2 | 53.6 ± 9.8 |
| PNPLA3 | AD-67605.10 | 30.7 ± 3.2 | 44.9 ± 3.4 | 42.2 ± 2.6 | AD-1636735.1 | 41.9 ± 2.3 | 51.9 ± 11.3 | 64.6 ± 11.6 |
| C3 | AD-571552.3 | 33.6 ± 7.3 | 73.4 ± 4.7 | 87.3 ± 7.4 | AD-1636714.1 | 25.1 ± 2.2 | 42.2 ± 7.6 | 50.4 ± 1.3 |
| Marc1 | AD-1531716.2 | 8 ± 1.4 | 20.3 ± 4.7 | 15.6 ± 2.3 | AD-1636778.1 | 7.5 ± 0.8 | 10.5 ± 1.5 | 13.2 ± 1.1 |
| C3 | AD-569269.6 | 7.3 ± 1 | 12.3 ± 1.4 | 12.3 ± 3.2 | AD-1479350.2 | 8.7 ± 1.2 | 10.5 ± 1.2 | 14.4 ± 1.7 |
| Marc1 | AD-1531718.2 | 9.1 ± 1.4 | 29.1 ± 5.1 | 23.1 ± 2.7 | AD-1636785.1 | 7.6 ± 1.3 | 12.6 ± 1.9 | 24.1 ± 2.7 |
| C3 | AD-1531663.3 | 14.9 ± 1.6 | 26.9 ± 4.6 | 56.5 ± 2.7 | AD-1636763.1 | 12.6 ± 2 | 14.5 ± 4.5 | 27.4 ± 3.6 |
| SCN9A | AD-1531765.2 | 40.2 ± 2.8 | 55.3 ± 7.9 | 68.2 ± 1.9 | AD-1636834.1 | 34.7 ± 3.3 | 38.6 ± 2.2 | 47.7 ± 10.4 |
| SCN9A | AD-1531735.2 | 33.2 ± 4 | 46.1 ± 5.2 | 34.9 ± 4 | AD-1636811.1 | 28.7 ± 3 | 42.5 ± 5.4 | 52.8 ± 4.3 |
| PNPLA3 | AD-519933.3 | 54.6 ± 8 | 99.2 ± 17.3 | 91.4 ± 18.6 | AD-1636757.1 | 52 ± 6.2 | 56.2 ± 4.3 | 60.4 ± 2.7 |
| PNPLA3 | AD-519780.2 | 50.1 ± 3.9 | 80.1 ± 12.2 | 79.5 ± 10.2 | AD-1636758.1 | 44.8 ± 7.9 | 55.5 ± 8 | 74.1 ± 6.4 |
| Marc1 | AD-1531679.2 | 28.2 ± 2.9 | 60.8 ± 10.5 | 61.4 ± 4.4 | AD-1636791.1 | 16.4 ± 1.4 | 46.6 ± 8.1 | 59 ± 7.7 |
| Marc1 | AD-1531692.2 | 13.5 ± 0.7 | 23.7 ± 1.7 | 17.9 ± 2.9 | AD-1636777.1 | 9.8 ± 2.7 | 20 ± 1.4 | 28.7 ± 3.8 |
| SCN9A | AD-1531741.2 | 72.7 ± 1.3 | 83.5 ± 8.9 | 69.8 ± 2.9 | AD-1636838.1 | 47.3 ± 10.9 | 76.9 ± 4 | 106.3 ± 11.5 |
| C3 | AD-572575.3 | 20.8 ± 4.2 | 57.3 ± 9.8 | 68.9 ± 11.1 | AD-1636703.1 | 26.4 ± 6 | 38 ± 10.6 | 58.9 ± 14.5 |
| SCN9A | AD-1531744.2 | 49.2 ± 3.9 | 65.5 ± 8.5 | 63.3 ± 7.5 | AD-1636831.1 | 34.5 ± 5.7 | 66.5 ± 5.5 | 89.5 ± 7.2 |
| PNPLA3 | AD-519354.4 | 62.3 ± 16.1 | 77.2 ± 22.9 | 84.6 ± 15.6 | AD-1636732.1 | 37.5 ± 7.3 | 44.5 ± 6.7 | 64.5 ± 13.5 |
| PNPLA3 | AD-67551.7 | 22.5 ± 1.9 | 38.4 ± 12 | 41 ± 4.2 | AD-1636737.1 | 30.5 ± 4.4 | 39.2 ± 8.3 | 60 ± 7.1 |
| Marc1 | AD-1531687.2 | 14.7 ± 2.6 | 34.6 ± 3.9 | 21.1 ± 1.9 | AD-1636779.1 | 14.3 ± 2.8 | 23.6 ± 1.9 | 32.5 ± 7.6 |
| SCN9A | AD-1531736.2 | 73.3 ± 10.3 | 78.8 ± 7.7 | 68.3 ± 6.1 | AD-1636843.1 | 82.1 ± 9.5 | 95.3 ± 12.7 | 107.5 ± 11.9 |
| Marc1 | AD-1531688.2 | 5 ± 1.1 | 13 ± 2.3 | 9.2 ± 1.3 | AD-1636772.1 | 6.5 ± 1 | 10.1 ± 0.5 | 11.2 ± 1.7 |
| SCN9A | AD-1531747.2 | 69.4 ± 2 | 77.8 ± 3.6 | 80 ± 5.3 | AD-1636836.1 | 45.7 ± 2.9 | 60.4 ± 5.5 | 93.2 ± 3.3 |
| SCN9A | AD-1531756.2 | 38.3 ± 4.9 | 46.5 ± 2.8 | 46.4 ± 5.2 | AD-1636813.1 | 29.8 ± 1.1 | 46.7 ± 4.7 | 53.2 ± 2.7 |
| Marc1 | AD-1531696.2 | 9.4 ± 0.8 | 22.3 ± 4.3 | 18.5 ± 4.2 | AD-1636783.1 | 7.5 ± 0.7 | 12.7 ± 1.3 | 25 ± 2.2 |
| C3 | AD-1531658.2 | 13.3 ± 1.8 | 30.7 ± 0.8 | 39.7 ± 3.7 | AD-1636692.1 | 12.1 ± 1.2 | 24.2 ± 5.8 | 40.9 ± 10.6 |
| SCN9A | AD-1531757.2 | 64.6 ± 4 | 75.8 ± 7.1 | 70.3 ± 3.8 | AD-1636844.1 | 30.1 ± 2.4 | 46.6 ± 5.4 | 59.5 ± 3.3 |
| PNPLA3 | AD-67565.3 | 62.4 ± 17.9 | 69.5 ± 15 | 68.4 ± 8.1 | AD-1636726.1 | 71.3 ± 5.6 | 50 ± 2.7 | 76.6 ± 18.7 |
| PNPLA3 | AD-1010714.3 | 52.6 ± 19 | 99.7 ± 26.3 | 85.9 ± 13 | AD-1636760.1 | 28.4 ± 5.4 | 40 ± 6 | 54.8 ± 4.3 |
| SCN9A | AD-1531728.2 | 60.8 ± 4.2 | 69.8 ± 9.1 | 76.8 ± 4.7 | AD-1636841.1 | 33.6 ± 5.1 | 53.3 ± 8.2 | 65.3 ± 8.5 |
| Marc1 | AD-1531686.2 | 16.4 ± 2.6 | 52.5 ± 3.5 | 50.2 ± 8.3 | AD-1636789.1 | 12.3 ± 2.3 | 25.2 ± 4.6 | 45.5 ± 4.1 |
| PNPLA3 | AD-67583.7 | 45.2 ± 4.6 | 81.4 ± 24.3 | 64.5 ± 13.5 | AD-1636762.1 | 46.4 ± 12.4 | 48.8 ± 8.4 | 48.8 ± 10.2 |
| C3 | AD-572388.7 | 20.2 ± 1.8 | 49.7 ± 7.8 | 68.7 ± 5.5 | AD-1636766.1 | 71 ± 9.6 | 81.7 ± 9.4 | 90.1 ± 12.4 |
| C3 | AD-1531662.2 | 37.3 ± 5.1 | 83.1 ± 8.3 | 91.9 ± 5.3 | AD-1636718.1 | 31.5 ± 1.6 | 68.9 ± 9.3 | 77.7 ± 5.9 |
| C3 | AD-571901.2 | 26.2 ± 7.2 | 62.6 ± 5.1 | 78.2 ± 7.4 | AD-1636707.1 | 32.1 ± 7.9 | 60 ± 7.6 | 61 ± 6.7 |
| PNPLA3 | AD-1010732.4 | 30.3 ± 6.7 | 63.6 ± 15 | 52.1 ± 4.7 | AD-1636727.1 | 39.3 ± 3.8 | 55 ± 13.3 | 59.5 ± 11 |
| PNPLA3 | AD-520061.6 | 32.7 ± 8.1 | 49.5 ± 8.4 | 51.3 ± 5.3 | AD-1636741.1 | 42.2 ± 5.7 | 44.4 ± 2.4 | 57.3 ± 4.9 |
| SCN9A | AD-1531770.2 | 50.6 ± 8.6 | 74.1 ± 0.9 | 76.6 ± 3.5 | AD-1636830.1 | 38.3 ± 1.7 | 59.3 ± 7.3 | 72.6 ± 7.7 |
| Marc1 | AD-1531705.2 | 5.8 ± 0.7 | 21.9 ± 2.7 | 11.9 ± 2.1 | AD-1636780.1 | 6 ± 0.7 | 14.2 ± 5.2 | 27.9 ± 2.5 |
| C3 | AD-569266.3 | 7.5 ± 1.3 | 19 ± 4.3 | 24.5 ± 5.1 | AD-1636689.1 | 12.2 ± 2.1 | 18.5 ± 3.2 | 22.2 ± 4.3 |
| SCN9A | AD-1531740.2 | 68.1 ± 10.5 | 84.9 ± 5.5 | 66.9 ± 2.4 | AD-1636839.1 | 41.3 ± 6 | 56.5 ± 9.4 | 72 ± 4.9 |
| PNPLA3 | AD-75265.5 | 48.9 ± 5.5 | 83.9 ± 20.7 | 82.7 ± 8.8 | AD-1636753.1 | 36.1 ± 10.1 | 55.8 ± 8.4 | 67.9 ± 6.8 |
| Marc1 | AD-1531709.2 | 13.9 ± 3.1 | 37.2 ± 7.5 | 46.9 ± 13.3 | AD-1636792.1 | 10.5 ± 0.7 | 20.9 ± 2.8 | 30.7 ± 6.5 |
| C3 | AD-569048.2 | 20.9 ± 4 | 56.4 ± 11.3 | 64.2 ± 11.2 | AD-1636709.1 | 34.3 ± 0.8 | 50.6 ± 10 | 75.3 ± 7.9 |
| C3 | AD-571633.3 | 34.2 ± 5.7 | 72.1 ± 7.6 | 81.3 ± 7 | AD-1636721.1 | 29.7 ± 2.1 | 51.3 ± 3 | 78.2 ± 9.8 |
| C3 | AD-569516.3 | 28.8 ± 2.2 | 76.2 ± 9.6 | 91.9 ± 10.4 | AD-1636719.1 | 32.5 ± 5.2 | 51.9 ± 12.9 | 72.2 ± 11.7 |
| PNPLA3 | AD-519346.5 | 26.2 ± 4.5 | 53 ± 6.2 | 51 ± 4.9 | AD-1636765.1 | 27 ± 5.3 | 28.3 ± 3.6 | 41.8 ± 5.1 |
| C3 | AD-571748.3 | 8.2 ± 2.8 | 26.5 ± 2.2 | 38.3 ± 5.8 | AD-1636693.1 | 13.5 ± 2.4 | 32.2 ± 7.1 | 37.7 ± 6.8 |
| Marc1 | AD-1531708.2 | 27.5 ± 1.5 | 61.3 ± 6.1 | 70.9 ± 12.7 | AD-1636807.1 | 18.9 ± 2.9 | 26.2 ± 4.7 | 49.5 ± 5.9 |
| C3 | AD-570712.7 | 7.3 ± 0.5 | 17.3 ± 1.6 | 28.1 ± 3.6 | AD-1479283.2 | 10.2 ± 0.7 | 16.5 ± 1.3 | 27.9 ± 4.1 |
| Marc1 | AD-1531706.2 | 5.4 ± 0.4 | 14.1 ± 1.1 | 8.5 ± 1.1 | AD-1636774.1 | 5.7 ± 0.9 | 10.8 ± 2.4 | 13.8 ± 1.1 |
| PNPLA3 | AD-67584.8 | 49.1 ± 8.5 | 57.2 ± 5.6 | 49.8 ± 13.5 | AD-1636725.1 | 57.4 ± 13 | 57.4 ± 16.8 | 67.4 ± 9.5 |
| C3 | AD-1531668.2 | 17.2 ± 2.9 | 49.8 ± 8.7 | 61.8 ± 9.7 | AD-1636715.1 | 13.8 ± 1.8 | 28.2 ± 4.4 | 45.9 ± 4.9 |
| PNPLA3 | AD-67577.7 | 27.2 ± 3.3 | 41.7 ± 6.5 | 44.1 ± 7.5 | AD-1636750.1 | 30.7 ± 7.3 | 38.2 ± 4.1 | 58.8 ± 7.1 |
| C3 | AD-571753.4 | 11.7 ± 2.3 | 30 ± 6.6 | 47.8 ± 10 | AD-1636702.1 | 12.3 ± 0.9 | 17.9 ± 3.4 | 31.6 ± 3.1 |
| C3 | AD-1531657.2 | 20.6 ± 5.8 | 58.1 ± 9.5 | 73 ± 7.9 | AD-1636705.1 | 16 ± 2 | 30.2 ± 5.1 | 42 ± 4.2 |
| C3 | AD-571715.5 | 5.7 ± 0.6 | 11.7 ± 0.9 | 24.5 ± 4.2 | AD-1636690.1 | 6.4 ± 1.5 | 13.3 ± 2.2 | 19.1 ± 2.2 |
| C3 | AD-1531659.2 | 12.1 ± 1.9 | 29.4 ± 3.5 | 38.2 ± 7.2 | AD-1636694.1 | 12.8 ± 1.8 | 22.3 ± 6.6 | 25.6 ± 2.1 |
| PNPLA3 | AD-67560.7 | 52.7 ± 14.7 | 63.9 ± 17.1 | 68.5 ± 10 | AD-1636743.1 | 43.9 ± 6.2 | 46.6 ± 7.3 | 51.7 ± 9.1 |
| PNPLA3 | AD-1531674.2 | 51.8 ± 5.6 | 55.2 ± 5.4 | 47.2 ± 8.1 | AD-1636756.1 | 47.3 ± 8.3 | 61.1 ± 10.9 | 60.3 ± 6.7 |
| PNPLA3 | AD-519757.6 | 48.2 ± 8.9 | 43.1 ± 14.7 | 59.6 ± 5.1 | AD-1636734.1 | 36.9 ± 8.1 | 65.6 ± 10.7 | 51.3 ± 10.8 |
| SCN9A | AD-1531732.2 | 65.4 ± 1.9 | 43.7 ± 8.3 | 57.1 ± 4.6 | AD-1636840.1 | 54.3 ± 6.5 | 63.4 ± 5.7 | 56.7 ± 12.5 |
| C3 | AD-1531656.2 | 57.5 ± 10.1 | 104.8 ± 19.6 | 90.9 ± 15.1 | AD-1636712.1 | 44.6 ± 2.5 | 59.1 ± 11.9 | 94.7 ± 8.9 |
| Marc1 | AD-1531678.2 | 36.1 ± 3.9 | 66 ± 4.3 | 58.6 ± 11.2 | AD-1636800.1 | 15.4 ± 3.1 | 22.7 ± 1.6 | 38.5 ± 5.7 |
| Marc1 | AD-1531701.2 | 15.3 ± 1.7 | 32.8 ± 2.4 | 31.4 ± 3.2 | AD-1636790.1 | 16 ± 2.9 | 31.8 ± 3.5 | 49.4 ± 7.7 |
| Marc1 | AD-1531680.2 | 5.1 ± 0.6 | 16.4 ± 1.8 | 9.7 ± 1.1 | AD-1636770.1 | 6.5 ± 0.8 | 14.5 ± 3.6 | 19.7 ± 5 |
| SCN9A | AD-1531734.2 | 56.4 ± 4.3 | 67.5 ± 10.7 | 82 ± 4 | AD-1636837.1 | 48.4 ± 6.4 | 78.6 ± 3.6 | 107.1 ± 13.3 |
| C3 | AD-568977.3 | 14.4 ± 1.7 | 38 ± 4.8 | 41.4 ± 11.1 | AD-1636699.1 | 17.7 ± 1.1 | 24.9 ± 3.3 | 39.3 ± 2.8 |
| C3 | AD-569268.10 | 6.8 ± 0.4 | 10.2 ± 1.9 | 14.2 ± 1.9 | AD-1479341.2 | 8.7 ± 1.6 | 12 ± 0.7 | 16.6 ± 2.5 |
| C3 | AD-572818.2 | 10.5 ± 1.5 | 27.2 ± 4.4 | 42 ± 7.4 | AD-1636691.1 | 13.1 ± 1.8 | 23.3 ± 2.2 | 36.9 ± 6.1 |
| SCN9A | AD-1531729.2 | 45 ± 3.7 | 60.9 ± 4.8 | 49.6 ± 7.2 | AD-1636815.1 | 35.8 ± 5.6 | 49.7 ± 6 | 51.2 ± 1.5 |
| Marc1 | AD-1531689.2 | 36.6 ± 7.1 | 61.4 ± 7.9 | 69.7 ± 4.9 | AD-1636795.1 | 22.5 ± 3.4 | 33.4 ± 1.5 | 51.1 ± 5.9 |
| PNPLA3 | AD-75275.3 | 56 ± 8.3 | 60.8 ± 11.8 | 44.6 ± 2.6 | AD-1636731.1 | 48.6 ± 4.2 | 61 ± 8.4 | 70.7 ± 11.9 |
| PNPLA3 | AD-67568.3 | 33.8 ± 2.8 | 35 ± 4.9 | 50.8 ± 8.1 | AD-1636744.1 | 36.2 ± 6.1 | 43.9 ± 5.5 | 48.5 ± 2.2 |
| C3 | AD-569494.2 | 98.1 ± 8 | 113.9 ± 3.9 | 105.2 ± 8.5 | AD-1636717.1 | 105.6 ± 13.2 | 92.8 ± 7.2 | 90.9 ± 14.1 |
| Marc1 | AD-1531722.2 | 26.5 ± 0.9 | 54.4 ± 5 | 54.4 ± 6.6 | AD-1636796.1 | 12.3 ± 2.2 | 21.8 ± 0.4 | 27.7 ± 3.4 |
| C3 | AD-571610.3 | 21.1 ± 7.8 | 49 ± 4.8 | 69.1 ± 9.5 | AD-1636710.1 | 25.4 ± 1.7 | 45.3 ± 5.6 | 61.5 ± 8.6 |
| SCN9A | AD-1531753.2 | 42.9 ± 1.7 | 59.3 ± 4.7 | 54.2 ± 5.1 | AD-1636822.1 | 33 ± 2.8 | 53.9 ± 6.7 | 62 ± 7.7 |
| SCN9A | AD-1531759.2 | 46.3 ± 3.4 | 50.6 ± 5.4 | 70.6 ± 2.3 | AD-1636828.1 | 30.8 ± 2.4 | 41.1 ± 4.7 | 52.9 ± 7.6 |
| C3 | AD-572495.3 | 8.7 ± 0.9 | 10.7 ± 1.7 | 17 ± 2.5 | AD-1636767.1 | 11.5 ± 1.2 | 15 ± 1.5 | 21.2 ± 5.2 |
| PNPLA3 | AD-1010719.3 | 30 ± 4.2 | 79.4 ± 24.3 | 28.9 ± 4 | AD-1636739.1 | 20.9 ± 2.1 | 24.4 ± 5.8 | 33.7 ± 8.2 |
| Marc1 | AD-1531683.2 | 28.6 ± 5.8 | 64.7 ± 6.8 | 54.8 ± 3 | AD-1636803.1 | 32.4 ± 4.6 | 58.5 ± 9.1 | 85.2 ± 5 |
| Marc1 | AD-1531711.2 | 22.6 ± 6.1 | 46.2 ± 9.7 | 41.4 ± 4.7 | AD-1636801.1 | 11.7 ± 1 | 20.4 ± 5.1 | 40.3 ± 4.2 |
| C3 | AD-1531664.2 | 19.1 ± 5.3 | 50.6 ± 8.8 | 59.4 ± 2.3 | AD-1636713.1 | 32.7 ± 5.9 | 47.5 ± 4.9 | 53.4 ± 2.6 |
| SCN9A | AD-1531762.2 | 57.9 ± 4 | 75.4 ± 6.4 | 73.8 ± 5.9 | AD-1636833.1 | 35.9 ± 3.5 | 49.3 ± 5.4 | 78.1 ± 13.9 |
| PNPLA3 | AD-67526.5 | 26.9 ± 8.8 | 41.8 ± 13.4 | 22 ± 2.2 | AD-1636740.1 | 19.7 ± 3.7 | 19.4 ± 1.9 | 32.9 ± 4.9 |
| SCN9A | AD-1531725.2 | 26.8 ± 4.4 | 32.5 ± 3.4 | 37.6 ± 3.4 | AD-1636823.1 | 23.8 ± 2.4 | 32.5 ± 5.5 | 36.7 ± 4.8 |
| SCN9A | AD-1531737.2 | 40.1 ± 2.1 | 43.3 ± 3.6 | 57.4 ± 10 | AD-1636827.1 | 33.5 ± 2.8 | 38 ± 4.2 | 54.5 ± 6.9 |
| PNPLA3 | AD-1531673.2 | 42 ± 4.6 | 78.6 ± 23.6 | 65.1 ± 4.5 | AD-1636749.1 | 40.7 ± 3.3 | 31.6 ± 5.5 | 35.8 ± 3.3 |
| Marc1 | AD-1531717.2 | 16.1 ± 2.2 | 38.5 ± 2.8 | 46.9 ± 5.2 | AD-1636799.1 | 11 ± 1.2 | 13.8 ± 2.7 | 25.9 ± 7.2 |
| C3 | AD-570644.2 | 15.1 ± 3.2 | 43.5 ± 6.8 | 61.4 ± 10.6 | AD-1636700.1 | 12.8 ± 1.7 | 30.7 ± 6 | 35.8 ± 7.3 |
| C3 | AD-568962.3 | 24 ± 4.2 | 57.1 ± 12.1 | 69.8 ± 7.9 | AD-1636706.1 | 21.1 ± 4.3 | 35.1 ± 2.9 | 50.5 ± 4.3 |
| Marc1 | AD-1531690.2 | 6.7 ± 0.9 | 14.2 ± 2.8 | 8.7 ± 1.3 | AD-1636771.1 | 6 ± 1.1 | 10.5 ± 1 | 10.8 ± 1.3 |
| SCN9A | AD-1531750.2 | 46.9 ± 2.7 | 58.3 ± 6.8 | 55.3 ± 4.3 | AD-1636826.1 | 41 ± 5.9 | 52.9 ± 9.3 | 66.5 ± 9.4 |
| Marc1 | AD-1531710.3 | 14.9 ± 2.2 | 34.3 ± 6.1 | 40.1 ± 7.6 | AD-1636848.1 | 8.2 ± 1.1 | 25 ± 6 | 44.4 ± 3.3 |
| PNPLA3 | AD-67578.3 | 61 ± 15.4 | 54.9 ± 4.2 | 66.5 ± 4.9 | AD-1636746.1 | 58.6 ± 4.5 | 60.5 ± 16.3 | 68.6 ± 14.1 |
| PNPLA3 | AD-67582.6 | 47.8 ± 7 | 71.9 ± 12.8 | 80.3 ± 12.1 | AD-1636747.1 | 39.9 ± 1.7 | 51.8 ± 5.2 | 66.7 ± 12.8 |
| C3 | AD-1531666.2 | 39.7 ± 10.3 | 71.9 ± 4.8 | 85.9 ± 11.1 | AD-1636723.1 | 15 ± 2.2 | 31.9 ± 6.2 | 67.3 ± 12.3 |
| Marc1 | AD-1531695.3 | 6.7 ± 0.6 | 11.8 ± 3.2 | 11 ± 1.4 | AD-1636847.1 | 7.5 ± 0.5 | 13.4 ± 2.7 | 19.9 ± 3.2 |
| SCN9A | AD-1531723.2 | 29.7 ± 5.8 | 37.8 ± 5.7 | 43.1 ± 3.3 | AD-1636824.1 | 19.3 ± 1.5 | 28.9 ± 6.7 | 32.1 ± 3 |
| PNPLA3 | AD-75270.4 | 46.6 ± 12 | 62.6 ± 15.2 | 65.6 ± 12.2 | AD-1636748.1 | 42.2 ± 1.7 | 39.2 ± 9.5 | 54.7 ± 2.5 |
| C3 | AD-1531671.2 | 11.8 ± 2.7 | 33.2 ± 4.2 | 49.2 ± 7.8 | AD-1636704.1 | 24.1 ± 3.8 | 37 ± 8.3 | 56.6 ± 10.9 |
| PNPLA3 | AD-519350.6 | 35.8 ± 6.4 | 50.4 ± 4.8 | 49.4 ± 5 | AD-1636724.1 | 45.8 ± 8.2 | 55 ± 8.8 | 50.7 ± 9 |
| SCN9A | AD-1531764.2 | 63.2 ± 4.6 | 66 ± 3.1 | 57 ± 10 | AD-1636832.1 | 57.3 ± 4.8 | 69 ± 7.9 | 62.6 ± 5.9 |
| SCN9A | AD-1531739.2 | 39.7 ± 5.3 | 58.5 ± 5.4 | 60.7 ± 7.9 | AD-1636835.1 | 24.5 ± 5.3 | 38.9 ± 1.9 | 57 ± 9.2 |
| Marc1 | AD-1531681.2 | 17.3 ± 3.6 | 55.2 ± 7.2 | 60.8 ± 11.6 | AD-1636788.1 | 11.3 ± 2.6 | 21.4 ± 5.8 | 32.2 ± 9.2 |
| Marc1 | AD-1531704.2 | 7.4 ± 0.7 | 36.8 ± 5 | 26.5 ± 2.2 | AD-1636787.1 | 8.6 ± 2.2 | 14.5 ± 3.1 | 23.5 ± 3.8 |
| PNPLA3 | AD-67564.3 | 71.1 ± 5.4 | 74.7 ± 9 | 76.7 ± 7.6 | AD-1636761.1 | 56.3 ± 2.7 | 55.7 ± 4.5 | 63.4 ± 6.7 |
| Marc1 | AD-1531676.2 | 18.8 ± 4.6 | 57.6 ± 10 | 80 ± 12.9 | AD-1636794.1 | 9.6 ± 1.9 | 22.2 ± 3.4 | 34.6 ± 7.4 |
| Marc1 | AD-1531700.2 | 30.1 ± 5.2 | 71.1 ± 6.8 | 76.9 ± 7.3 | AD-1636804.1 | 12.8 ± 2.6 | 28.6 ± 2.7 | 51.1 ± 9.4 |
| Marc1 | AD-1531702.2 | 37.9 ± 6.4 | 72.7 ± 4.3 | 75.3 ± 5.5 | AD-1636802.1 | 30.3 ± 4.9 | 55 ± 9.5 | 71.9 ± 20.4 |
| SCN9A | AD-1531730.2 | 39.4 ± 2.8 | 47.3 ± 1.2 | 42.4 ± 6.1 | AD-1636814.1 | 30.6 ± 1.6 | 46.2 ± 2.2 | 57.3 ± 0.4 |
| SCN9A | AD-1531738.2 | 32.3 ± 5.3 | 39.4 ± 1.9 | 45 ± 5.5 | AD-1636812.1 | 30.4 ± 2.2 | 38.5 ± 7.1 | 43.3 ± 8 |
| SCN9A | AD-1531733.3 | 45.3 ± 2 | 53.3 ± 10.4 | 35.1 ± 6.9 | AD-1636850.1 | 29.7 ± 3.6 | 44.5 ± 13.3 | 59.6 ± 9.9 |
| PNPLA3 | AD-67554.11 | 39.8 ± 4.4 | 45.5 ± 10 | 55.4 ± 7 | AD-1636738.1 | 48.8 ± 4.6 | 56.6 ± 13.9 | 56 ± 9.1 |
| Marc1 | AD-1531685.2 | 25.3 ± 1.4 | 41.9 ± 6.6 | 51.9 ± 2.1 | AD-1636797.1 | 6 ± 0.9 | 14.9 ± 2.9 | 23.6 ± 1.9 |
| PNPLA3 | AD-75269.3 | 49.5 ± 10.5 | 66.5 ± 13.9 | 44.8 ± 8.1 | AD-1636728.1 | 44.3 ± 2.7 | 40.4 ± 4 | 57.7 ± 11.3 |
| SCN9A | AD-1531752.2 | 87.9 ± 13.1 | 64.7 ± 10.1 | 70 ± 9.8 | AD-1636842.1 | 62.9 ± 1.5 | 78.6 ± 8.9 | 87.1 ± 5.6 |
| SCN9A | AD-1531754.3 | 42.1 ± 1.8 | 46.6 ± 3.8 | 39.8 ± 6.3 | AD-1636852.1 | 25.4 ± 4 | 46 ± 2.2 | 52.6 ± 2.1 |
| PNPLA3 | AD-518942.2 | 59 ± 6.6 | 90.6 ± 20.3 | 106.6 ± 15.5 | AD-1636764.1 | 37.6 ± 5.1 | 33.4 ± 4.9 | 40.6 ± 6.9 |
| C3 | AD-571932.2 | 22.1 ± 2.2 | 45.8 ± 6.9 | 62 ± 6.7 | AD-1636698.1 | 17.8 ± 1.9 | 31 ± 5.9 | 49.4 ± 11.2 |
| C3 | AD-572022.2 | 14.4 ± 2.8 | 34 ± 3.8 | 44.4 ± 6.9 | AD-1636697.1 | 15.9 ± 1.1 | 32.2 ± 5.4 | 52.1 ± 7.3 |
| SCN9A | AD-1531760.2 | 46.7 ± 3.2 | 68.7 ± 6.3 | 58.3 ± 1.6 | AD-1636816.1 | 29.1 ± 5.4 | 51.5 ± 7.6 | 60.9 ± 8.7 |
| SCN9A | AD-1531766.2 | 50.2 ± 8.7 | 55.5 ± 5.8 | 48.9 ± 4.1 | AD-1636846.1 | 55.2 ± 4.6 | 67.2 ± 14.9 | 87.1 ± 18.8 |
| C3 | AD-572577.3 | 35.8 ± 7.2 | 79.9 ± 14.7 | 95.7 ± 6.3 | AD-1636711.1 | 51 ± 12.3 | 74.5 ± 14.2 | 89.2 ± 5.4 |
| Marc1 | AD-1531697.2 | 21.5 ± 4.6 | 41 ± 1.2 | 26.5 ± 0.5 | AD-1636793.1 | 13.1 ± 1.9 | 17.1 ± 3.5 | 31.4 ± 5.3 |
| PNPLA3 | AD-67561.3 | 71.2 ± 14.1 | 81.5 ± 16.5 | 101.6 ± 7.1 | AD-1636742.1 | 65.7 ± 4.6 | 93.1 ± 24.5 | 74.2 ± 12.7 |
| PNPLA3 | AD-67586.3 | 73.6 ± 11.5 | 87.6 ± 12.8 | 86.7 ± 6.3 | AD-1636755.1 | 57.5 ± 5.8 | 61.7 ± 12.1 | 64.6 ± 9.3 |
| C3 | AD-569763.5 | 18.2 ± 4.8 | 45.4 ± 3.6 | 52.7 ± 2.7 | AD-1636696.1 | 19.2 ± 6.9 | 34.1 ± 5.9 | 43.5 ± 5.2 |
| SCN9A | AD-1531726.2 | 32.2 ± 2.5 | 42 ± 3.8 | 46.7 ± 4.1 | AD-1636821.1 | 24.9 ± 1.7 | 39.4 ± 4.5 | 54.4 ± 2.4 |
| SCN9A | AD-1531742.3 | 32.4 ± 5.7 | 52.4 ± 4.3 | 43.4 ± 4.2 | AD-1636851.1 | 23.8 ± 4.1 | 56.9 ± 3.2 | 75.8 ± 13.1 |
| PNPLA3 | AD-67573.3 | 62.3 ± 10.5 | 74.5 ± 8.6 | 77.5 ± 10.2 | AD-1636751.1 | 42.6 ± 2.7 | 41.8 ± 5.2 | 69.3 ± 10.7 |
| SCN9A | AD-1531761.2 | 58.2 ± 5.9 | 72.5 ± 5.2 | 60.6 ± 8.9 | AD-1636818.1 | 26.3 ± 4.7 | 47.6 ± 10 | 56.8 ± 6.5 |
| Marc1 | AD-1531712.2 | 8 ± 0.2 | 19.6 ± 2 | 14.5 ± 0.5 | AD-1636781.1 | 11 ± 0.1 | 13.5 ± 0.7 | 19.5 ± 3.7 |
| C3 | AD-1531669.2 | 48.1 ± 3.2 | 87 ± 9.8 | 80.1 ± 5.5 | AD-1636722.1 | 29.7 ± 3.1 | 50.1 ± 3.9 | 59.9 ± 5.4 |
| SCN9A | AD-1531745.2 | 41.3 ± 3.1 | 50.1 ± 2.4 | 42 ± 1.9 | AD-1636820.1 | 29.3 ± 2.2 | 38.5 ± 2.8 | 47.9 ± 3.8 |
| SCN9A | AD-1531724.2 | 48.3 ± 2.7 | 55.4 ± 4.6 | 47.9 ± 0.9 | AD-1636817.1 | 38 ± 6.1 | 50.9 ± 5 | 67.9 ± 5.4 |
| SCN9A | AD-1531731.2 | 43.6 ± 5.2 | 52.8 ± 1.2 | 66.9 ± 7 | AD-1636825.1 | 33.6 ± 4.3 | 49.6 ± 5.4 | 56.3 ± 2 |
| C3 | AD-570132.3 | 26.7 ± 3.7 | 60.8 ± 9.6 | 87.8 ± 11.1 | AD-1636708.1 | 19.5 ± 3.6 | 31 ± 3.8 | 45.3 ± 5.5 |
| SCN9A | AD-1531769.2 | 38.3 ± 4.6 | 53.1 ± 6.1 | 48.9 ± 3.6 | AD-1636819.1 | 32.6 ± 2.1 | 43.7 ± 5.3 | 54.3 ± 1.1 |
| Marc1 | AD-1531694.2 | 6.4 ± 0.6 | 17.3 ± 2 | 11.6 ± 1.7 | AD-1636775.1 | 8 ± 1.9 | 15.7 ± 2.8 | 19 ± 3.1 |
| Marc1 | AD-1531677.2 | 31.7 ± 3.8 | 59.5 ± 7.4 | 60.1 ± 15.2 | AD-1636784.1 | 16.3 ± 1.8 | 25.4 ± 6.1 | 33 ± 4.8 |
| SCN9A | AD-1531727.2 | 50.1 ± 2.8 | 61.8 ± 5.6 | 74.4 ± 6.6 | AD-1636829.1 | 42.8 ± 3.9 | 59.8 ± 7.2 | 68.7 ± 9 |
| PNPLA3 | AD-67575.11 | 62.6 ± 13.6 | 56.2 ± 5.8 | 58.4 ± 4.3 | AD-1636768.1 | 49.4 ± 9.5 | 50.9 ± 6.4 | 48.9 ± 7.4 |
| PNPLA3 | AD-75274.6 | 72.6 ± 6 | 74.9 ± 13.3 | 96.4 ± 13.1 | AD-1636745.1 | 66 ± 8.7 | 68.9 ± 7.1 | 86.5 ± 7.2 |
| SCN9A | AD-1531768.2 | 32.2 ± 1.8 | 46.7 ± 4.3 | 54.9 ± 5.9 | AD-1636809.1 | 20 ± 0.9 | 30.9 ± 4.4 | 43.4 ± 4.9 |
| C3 | AD-570134.4 | 7.7 ± 1.1 | 12.8 ± 0.6 | 24.1 ± 7 | AD-1636688.1 | 9 ± 1 | 20.9 ± 5.7 | 31.8 ± 8.4 |
| Marc1 | AD-1531707.2 | 6.6 ± 1.2 | 15.8 ± 0.7 | 9.2 ± 0.8 | AD-1636773.1 | 7.9 ± 1 | 10 ± 0.4 | 12.1 ± 0.6 |
| PNPLA3 | AD-75272.3 | 56.9 ± 19.1 | 73.2 ± 12 | 68.6 ± 13.7 | AD-1636752.1 | 41 ± 6 | 42 ± 7.5 | 69.6 ± 9.1 |
| PNPLA3 | AD-67567.3 | 82.7 ± 22.8 | 95.3 ± 15.3 | 85.4 ± 9.9 | AD-1636759.1 | 56.3 ± 6.1 | 62.9 ± 15.9 | 72.3 ± 8.3 |
| Marc1 | AD-1531714.3 | 6.4 ± 0.9 | 18.1 ± 2.3 | 23.7 ± 5.3 | AD-1636849.1 | 9 ± 1 | 16.6 ± 1.8 | 24.5 ± 1.2 |
| Marc1 | AD-1531720.2 | 5.4 ± 0.7 | 12.6 ± 1.7 | 10.8 ± 1.4 | AD-1636776.1 | 5.3 ± 0.6 | 10.9 ± 1.2 | 12.6 ± 1.2 |
| SCN9A | AD-1531746.2 | 73.3 ± 4.7 | 86.7 ± 2.2 | 71.3 ± 10.6 | AD-1636845.1 | 43.2 ± 5.8 | 91.2 ± 8.6 | 86.4 ± 19.1 |
| SCN9A | AD-1531755.2 | 37.8 ± 6.1 | 49.1 ± 5.4 | 46.9 ± 7.4 | AD-1636810.1 | 36.2 ± 2.1 | 61.4 ± 3.2 | 73.5 ± 5.5 |
| Marc1 | AD-1531675.2 | 16.9 ± 3.3 | 32.5 ± 4 | 33 ± 5.7 | AD-1636786.1 | 10.1 ± 1.6 | 16.9 ± 4.3 | 27 ± 4.3 |
| SCN9A | AD-1531767.2 | 28.3 ± 1.2 | 44 ± 2.7 | 56.2 ± 8.9 | AD-1636808.1 | 20.5 ± 1.4 | 32 ± 3.3 | 39.4 ± 5.1 |
| PNPLA3 | AD-520053.7 | 30.9 ± 5.9 | 34.7 ± 8.4 | 52.9 ± 8.6 | AD-1636736.1 | 31.1 ± 6.6 | 44 ± 4.2 | 52.5 ± 4 |
| PNPLA3 | AD-1010734.3 | 42.8 ± 16.5 | 58.8 ± 17.2 | 49.6 ± 9.8 | AD-1636730.1 | 50.8 ± 10.1 | 38.6 ± 7.4 | 53.7 ± 6.5 |

TABLE 14
In vitro activity for various designs targeting Agt in Hep3B

| Parent | | | | D1 | | | |
|---|---|---|---|---|---|---|---|
| Duplex ID | 10 nM | 1 nM | 0.1 nM | Duplex ID | 10 nM | 1 nM | 0.1 nM |
| AD-1632799.1 | 88 ± 15 | 105 ± 23 | 90 ± 21 | AD-1657992.1 | 55 ± 11 | 91 ± 9 | 73 ± 8 |
| AD-1632801.1 | 6 ± 1 | 23 ± 4 | 33 ± 3 | AD-1657994.1 | 2 ± 1 | 12 ± 3 | 15 ± 4 |
| AD-1632805.1 | 82 ± 7 | 95 ± 7 | 83 ± 12 | AD-1657998.1 | 43 ± 4 | 65 ± 16 | 66 ± 6 |
| AD-1632838.1 | 58 ± 5 | 94 ± 7 | 92 ± 10 | AD-1658030.1 | 64 ± 5 | 84 ± 7 | 82 ± 8 |
| AD-1684490.1 | 50 ± 11 | 83 ± 26 | 80 ± 18 | AD-1684491.1 | 38 ± 12 | 67 ± 14 | 73 ± 17 |
| AD-1684492.1 | 28 ± 4 | 68 ± 7 | 71 ± 20 | AD-1684493.1 | 19 ± 2 | 47 ± 12 | 70 ± 11 |
| AD-1684494.1 | 92 ± 19 | 101 ± 10 | 116 ± 6 | AD-1684495.1 | 18 ± 4 | 54 ± 9 | 60 ± 6 |
| AD-1684496.1 | 24 ± 5 | 72 ± 8 | 99 ± 10 | AD-1684497.1 | 4 ± 1 | 15 ± 3 | 42 ± 7 |
| AD-1684498.1 | 8 ± 2 | 31 ± 9 | 66 ± 9 | AD-1684499.1 | 34 ± 8 | 53 ± 10 | 79 ± 8 |
| AD-1684500.1 | 4 ± 1 | 16 ± 5 | 33 ± 6 | AD-1684501.1 | 2 ± 0 | 7 ±2 | 24 ± 2 |
| AD-1684502.1 | 98 ± 12 | 107 ± 8 | 98 ± 3 | AD-1684503.1 | 78 ± 15 | 102 ± 10 | 112 ± 14 |
| AD-1684504.1 | 12 ± 2 | 56 ± 6 | 78 ± 10 | AD-1684505.1 | 1 ± 0 | 7 ± 3 | 18 ± 5 |
| AD-1684506.1 | 16 ± 5 | 53 ± 12 | 58 ± 11 | AD-1684507.1 | 10 ± 3 | 46 ± 9 | 54 ± 6 |
| AD-1684508.1 | 31 ± 8 | 87 ± 10 | 101 ± 15 | AD-1684509.1 | 5 ± 1 | 17 ± 2 | 52 ± 3 |
| AD-1684510.1 | 95 ± 8 | 119 ± 9 | 131 ± 11 | AD-1684511.1 | 30 ± 6 | 67 ± 5 | 96 ± 13 |
| AD-1684512.1 | 2 ± 1 | 9 ± 3 | 24 ± 3 | AD-1684513.1 | 4 ± 2 | 28 ± 3 | 49 ± 9 |
| AD-1684514.1 | 39 ± 12 | 67 ± 8 | 82 ± 10 | AD-1684515.1 | 44 ± 9 | 88 ± 10 | 100 ± 4 |
| AD-1632840.1 | 17 ± 4 | 62 ± 5 | 77 ± 7 | AD-1658032.1 | 7 ± 2 | 34 ± 3 | 52 ± 3 |
| AD-1632841.1 | 9 ± 2 | 45 ± 8 | 70 ± 7 | AD-1658033.1 | 2 ± 0 | 21 ± 4 | 32 ± 6 |
| AD-1632842.1 | 62 ± 11 | 60 ± 4 | 67 ± 13 | AD-1658034.1 | 29 ± 6 | 77 ± 17 | 72 ± 12 |
| AD-1632843.1 | 6 ± 3 | 38 ± 6 | 45 ± 5 | AD-1658035.1 | 3 ± 1 | 9 ± 1 | 18 ± 3 |
| AD-1632844.1 | 7 ± 1 | 28 ± 5 | 45 ± 6 | AD-1658036.1 | 3 ± 0 | 12 ± 2 | 20 ± 4 |
| AD-1632846.1 | 7 ± 3 | 30 ± 7 | 54 ± 10 | AD-1658038.1 | 5 ± 2 | 18 ± 2 | 38 ± 1 |
| AD-1632847.1 | 9 ± 4 | 35 ± 7 | 47 ± 4 | AD-1658039.1 | 2 ± 0 | 5 ± 1 | 15 ± 7 |
| AD-1632848.1 | 67 ± 11 | 92 ± 8 | 108 ± 8 | AD-1658040.1 | 5 ± 1 | 18 ± 2 | 34 ± 5 |
| AD-1632849.1 | 4 ± 1 | 13 ± 2 | 22 ± 1 | AD-1658041.1 | 7 ± 2 | 16 ± 0 | 31 ± 4 |
| AD-1632836.1 | 1 ± 0 | 3 ± 2 | 7 ± 1 | AD-1658042.1 | 1 ± 0 | 1 ± 0 | 3 ± 1 |
| AD-1632850.1 | 26 ± 2 | 62 ± 7 | 70 ± 9 | AD-1658043.1 | 2 ± 0 | 7 ± 1 | 14 ± 2 |
| AD-1632851.1 | 17 ± 5 | 53 ± 8 | 74 ± 5 | AD-1658044.1 | 1 ± 0 | 6 ± 2 | 12 ± 2 |
| AD-1632852.1 | 4 ± 2 | 23 ± 4 | 46 ± 10 | AD-1658045.1 | 2 ± 1 | 6 ± 2 | 16 ± 2 |
| AD-1632853.1 | 16 ± 7 | 55 ± 14 | 62 ± 7 | AD-1658046.1 | 2 ± 1 | 6 ± 1 | 19 ± 5 |
| AD-1632854.1 | 40 ± 12 | 68 ± 11 | 74 ± 9 | AD-1658047.1 | 6 ± 3 | 17 ± 1 | 30 ± 7 |
| AD-1632855.1 | 2 ± 1 | 9 ± 1 | 13 ± 1 | AD-1658048.1 | 3 ± 1 | 9 ± 3 | 18 ± 4 |
| AD-1632856.1 | 21 ± 6 | 47 ± 8 | 75 ± 9 | AD-1658049.1 | 1 ± 0 | 7 ± 1 | 16 ± 3 |
| AD-1632857.1 | 8 ± 3 | 40 ± 5 | 43 ± 11 | AD-1658050.1 | 5 ± 1 | 20 ± 5 | 29 ± 4 |
| AD-1632858.1 | 6 ± 1 | 23 ± 6 | 48 ± 4 | AD-1658051.1 | 6 ± 2 | 14 ± 1 | 31 ± 2 |
| AD-1632859.1 | 3 ± 2 | 12 ± 3 | 43 ± 8 | AD-1658052.1 | 2 ± 0 | 6 ± 0 | 17 ± 3 |
| AD-1632860.1 | 9 ± 3 | 27 ± 4 | 57 ± 5 | AD-1658053.1 | 6 ± 1 | 22 ± 2 | 51 ± 4 |
| AD-1632861.1 | 10 ± 2 | 38 ± 5 | 63 ± 8 | AD-1658054.1 | 2 ± 1 | 8 ± 4 | 22 ± 3 |
| AD-1632862.1 | 53 ± 10 | 69 ± 10 | 100 ± 11 | AD-1658055.1 | 12 ± 4 | 40 ± 5 | 69 ± 6 |
| AD-1632863.1 | 13 ± 2 | 29 ± 5 | 75 ± 14 | AD-1658056.1 | 18 ± 5 | 51 ± 1 | 80 ± 5 |
| AD-1632864.1 | 61 ± 11 | 74 ± 9 | 113 ± 24 | AD-1658057.1 | 67 ± 6 | 66 ± 16 | 96 ± 18 |
| AD-1632865.1 | 37 ± 4 | 63 ± 10 | 86 ± 17 | AD-1658058.1 | 19 ± 5 | 40 ± 6 | 56 ± 12 |
| AD-1632866.1 | 17 ± 1 | 42 ± 8 | 62 ± 8 | AD-1658059.1 | 12 ± 4 | 27 ± 6 | 41 ± 7 |
| AD-1632991.1 | 18 ± 5 | 50 ± 2 | 74 ± 10 | AD-1658184.1 | 10 ± 2 | 38 ± 9 | 58 ± 9 |
| AD-1632992.1 | 63 ± 9 | 100 ± 20 | 90 ± 11 | AD-1658185.1 | 38 ± 6 | 67 ± 12 | 86 ± 13 |
| AD-1632993.1 | 50 ± 4 | 87 ± 8 | 102 ± 20 | AD-1658186.1 | 5 ± 1 | 29 ± 1 | 55 ± 9 |
| AD-1632994.1 | 6 ± 1 | 28 ± 2 | 65 ± 14 | AD-1658187.1 | 3 ± 0 | 11 ± 1 | 32 ± 4 |
| AD-1632995.1 | 35 ± 9 | 47 ± 4 | 75 ± 17 | AD-1658188.1 | 4 ± 2 | 11 ± 3 | 26 ± 4 |
| AD-1632996.1 | 13 ± 2 | 42 ± 8 | 76 ± 6 | AD-1658189.1 | 7 ± 2 | 27 ± 4 | 56 ± 12 |
| AD-1632997.1 | 5 ± 1 | 23 ± 4 | 50 ± 6 | AD-1658190.1 | 4 ± 1 | 19 ± 6 | 31 ± 6 |
| AD-1632998.1 | 8 ± 2 | 23 ± 2 | 58 ± 4 | AD-1658191.1 | 13 ± 4 | 23 ± 3 | 48 ± 11 |
| AD-1632999.1 | 41 ± 5 | 75 ± 4 | 83 ± 16 | AD-1658192.1 | 21 ± 6 | 46 ± 10 | 77 ± 9 |
| AD-1633000.1 | 106 ± 9 | 126 ± 8 | 96 ± 10 | AD-1658193.1 | 25 ± 3 | 60 ± 5 | 83 ± 11 |
| AD-1633003.1 | 4 ± 1 | 33 ± 7 | 64 ± 9 | AD-1658196.1 | 2 ± 0 | 6 ± 2 | 22 ± 6 |
| AD-1633004.1 | 55 ± 10 | 83 ± 11 | 122 ± 18 | AD-1658197.1 | 8 ± 1 | 24 ± 5 | 32 ± 3 |
| AD-1633007.1 | 6 ± 1 | 19 ± 2 | 69 ± 8 | AD-1658200.1 | 2 ± 0 | 7 ± 1 | 22 ± 4 |
| AD-1633008.1 | 26 ± 7 | 53 ± 8 | 53 ± 3 | AD-1658201.1 | 19 ± 3 | 63 ± 12 | 89 ± 9 |
| AD-1633009.1 | 5 ± 1 | 12 ± 3 | 30 ± 5 | AD-1658202.1 | 10 ± 1 | 25 ± 5 | 50 ± 9 |
| AD-1633010.1 | 5 ± 0 | 9 ± 3 | 13 ± 2 | AD-1658203.1 | 1 ± 0 | 1 ± 0 | 4 ± 1 |
| AD-1633011.1 | 3 ± 1 | 10 ± 2 | 26 ± 1 | AD-1658204.1 | 1 ± 0 | 5 ± 1 | 16 ± 3 |
| AD-1633012.1 | 5 ± 1 | 33 ± 4 | 64 ± 9 | AD-1658205.1 | 2 ± 0 | 4 ± 1 | 10 ± 2 |
| AD-1633013.1 | 3 ± 1 | 10 ± 3 | 25 ± 5 | AD-1658206.1 | 1 ± 0 | 5 ± 1 | 14 ± 3 |
| AD-1633014.1 | 3 ± 1 | 23 ± 4 | 35 ± 5 | AD-1658207.1 | 4 ± 1 | 12 ± 3 | 22 ± 5 |
| AD-1633015.1 | 16 ± 4 | 58 ± 5 | 72 ± 7 | AD-1658208.1 | 4 ± 0 | 26 ± 6 | 39 ± 6 |
| AD-1633016.1 | 21 ± 5 | 90 ± 5 | 104 ± 13 | AD-1658209.1 | 14 ± 3 | 51 ± 4 | 71 ± 4 |
| AD-1633018.1 | 84 ± 5 | 118 ± 17 | 109 ± 7 | AD-1658211.1 | 84 ± 18 | 105 ± 10 | 102 ± 18 |
| AD-1633019.1 | 8 ± 1 | 28 ± 0 | 50 ± 5 | AD-1658212.1 | 2 ± 0 | 4 ± 1 | 8 ± 3 |
| AD-1633020.1 | 27 ± 5 | 70 ± 6 | 96 ± 13 | AD-1658213.1 | 9 ± 2 | 28 ± 6 | 56 ± 6 |
| AD-1633027.1 | 17 ± 2 | 46 ± 7 | 65 ± 12 | AD-1658220.1 | 4 ± 1 | 6 ± 1 | 15 ± 4 |
| AD-1633028.1 | 15 ± 2 | 49 ± 8 | 63 ± 7 | AD-1658221.1 | 5 ± 1 | 28 ± 4 | 49 ± 7 |
| AD-1633029.1 | 113 ± 4 | 120 ± 14 | 108 ± 15 | AD-1658222.1 | 28 ± 2 | 47 ± 4 | 58 ± 9 |
| AD-1633030.1 | 19 ± 3 | 70 ± 13 | 86 ± 7 | AD-1658223.1 | 4 ± 1 | 25 ± 7 | 36 ± 3 |
| AD-1633031.1 | 6 ± 3 | 14 ± 2 | 40 ± 7 | AD-1658224.1 | 4 ± 1 | 4 ± 0 | 10 ± 2 |
| AD-84731.2 | 8 ± 1 | 16 ± 1 | 28 ± 7 | AD-1658225.1 | 3 ± 1 | 6 ± 1 | 12 ± 2 |
| AD-1633032.1 | 6 ± 2 | 14 ± 4 | 29 ± 7 | AD-1658226.1 | 4 ± 1 | 6 ± 1 | 19 ± 4 |
| AD-1633033.1 | 6 ± 1 | 12 ± 2 | 29 ± 3 | AD-1658227.1 | 3 ± 1 | 5 ± 1 | 10 ± 3 |
| AD-1633034.1 | 82 ± 12 | 92 ± 11 | 95 ± 16 | AD-1658228.1 | 42 ± 8 | 75 ± 17 | 95 ± 13 |
| AD-1684516.1 | 42 ± 11 | 83 ± 18 | 77 ± 23 | AD-1684517.1 | 10 ± 2 | 30 ± 9 | 70 ± 6 |
| AD-1684518.1 | 80 ± 10 | 107 ± 22 | 108 ± 20 | AD-1684519.1 | 100 ± 7 | 107 ± 21 | 111 ± 21 |
| AD-1684520.1 | 24 ± 6 | 75 ± 13 | 87 ± 8 | AD-1684521.1 | 6 ± 1 | 15 ± 5 | 21 ± 2 |
| AD-1633048.1 | 46 ± 9 | 82 ± 8 | 98 ± 10 | AD-1658242.1 | 20 ± 6 | 43 ± 6 | 65 ± 10 |
| AD-1633049.1 | 10 ± 2 | 28 ± 6 | 39 ± 10 | AD-1658243.1 | 9 ± 1 | 19 ± 2 | 45 ± 4 |
| AD-1633094.1 | 19 ± 7 | 31 ± 3 | 56 ± 7 | AD-1658288.1 | 24 ± 4 | 53 ± 10 | 63 ± 13 |
| AD-1633095.1 | 48 ± 15 | 63 ± 13 | 66 ± 11 | AD-1658289.1 | 16 ± 5 | 36 ± 7 | 55 ± 7 |
| AD-1633119.1 | 43 ± 8 | 72 ± 17 | 96 ± 16 | AD-1658313.1 | 25 ± 3 | 49 ± 8 | 54 ± 5 |
| AD-1633121.1 | 18 ± 5 | 53 ± 10 | 74 ± 13 | AD-1658315.1 | 3 ± 1 | 11 ± 2 | 34 ± 9 |
| AD-1633122.1 | 66 ± 18 | 85 ± 17 | 96 ± 15 | AD-1658316.1 | 13 ± 4 | 40 ± 8 | 63 ± 8 |
| AD-1633254.2 | 11 ± 4 | 21 ± 6 | 32 ± 5 | AD-1658448.2 | 7 ± 1 | 16 ± 4 | 21 ± 9 |
| AD-1633257.2 | 10 ± 2 | 27 ± 4 | 39 ± 7 | AD-1658451.2 | 9 ± 1 | 23 ± 3 | 28 ± 3 |
| AD-1633269.2 | 10 ± 0 | 18 ± 4 | 22 ± 2 | AD-1658463.2 | 7 ± 1 | 9 ± 2 | 11 ± 1 |
| AD-1633270.2 | 47 ± 3 | 68 ± 2 | 75 ± 12 | AD-1658464.2 | 48 ± 4 | 69 ± 8 | 81 ± 13 |
| AD-1633271.2 | 12 ± 3 | 29 ± 8 | 44 ± 10 | AD-1658465.2 | 8 ± 3 | 17 ± 3 | 22 ± 4 |
| AD-1633272.2 | 27 ± 6 | 35 ± 6 | 57 ± 4 | AD-1658466.2 | 20 ± 3 | 27 ± 4 | 43 ± 7 |
| AD-1633273.2 | 76 ± 2 | 78 ± 2 | 98 ± 17 | AD-1658467.2 | 83 ± 6 | 76 ± 11 | 101 ± 11 |
| AD-1633290.2 | 42 ± 4 | 68 ± 11 | 75 ± 9 | AD-1658484.2 | 5 ± 1 | 16 ± 6 | 28 ± 3 |
| AD-1633291.2 | 30 ± 5 | 50 ± 13 | 64 ± 11 | AD-1658485.2 | 73 ± 15 | 97 ± 8 | 93 ± 20 |
| AD-1633324.2 | 6 ± 2 | 14 ± 3 | 22 ± 5 | AD-1658519.2 | 2 ± 0 | 4 ± 2 | 4 ± 1 |
| AD-84739.5 | 2 ± 0 | 3 ± 1 | 3 ± 1 | AD-1658520.2 | 2 ± 0 | 4 ± 1 | 8 ± 1 |
| AD-1633325.2 | 2 ± 0 | 3 ± 1 | 5 ± 2 | AD-1658521.2 | 1 ± 1 | 4 ± 1 | 5 ± 1 |
| AD-1633326.2 | 3 ± 1 | 7 ± 1 | 17 ± 1 | AD-1658522.2 | 1 ± 0 | 2 ± 0 | 3 ± 1 |
| AD-1633327.2 | 20 ± 4 | 38 ± 5 | 49 ± 3 | AD-1658523.2 | 12 ± 1 | 29 ± 6 | 58 ± 3 |
| AD-1633328.2 | 7 ± 1 | 16 ± 2 | 27 ± 3 | AD-1658524.2 | 4 ± 1 | 11 ± 1 | 28 ± 2 |
| AD-1633329.2 | 7 ± 1 | 21 ± 4 | 44 ± 7 | AD-1658525.2 | 2 ± 1 | 6 ± 1 | 12 ± 4 |
| AD-1633330.2 | 14 ± 3 | 34 ± 2 | 58 ± 1 | AD-1658526.2 | 6 ± 1 | 24 ± 7 | 33 ± 6 |
| AD-1633331.2 | 112 ± 5 | 115 ± 6 | 123 ± 19 | AD-1658527.2 | 31 ± 2 | 59 ± 5 | 80 ± 9 |
| AD-1633332.2 | 12 ± 3 | 40 ± 8 | 61 ± 6 | AD-1658528.2 | 8 ± 2 | 25 ± 3 | 33 ± 3 |
| AD-1633333.2 | 2 ± 0 | 8 ± 2 | 15 ± 1 | AD-1658529.2 | 3 ± 0 | 6 ± 1 | 12 ± 2 |
| AD-1633334.2 | 9 ± 1 | 24 ± 4 | 50 ± 3 | AD-1658530.2 | 6 ± 1 | 11 ± 2 | 18 ± 4 |
| AD-1633335.2 | 105 ± 18 | 127 ± 10 | 140 ± 12 | AD-1658531.2 | 27 ± 2 | 50 ± 5 | 73 ± 8 |
| AD-1633343.2 | 63 ± 5 | 87 ± 7 | 100 ± 14 | AD-1658539.2 | 32 ± 4 | 44 ± 5 | 69 ± 4 |
| AD-1633345.2 | 29 ± 3 | 56 ± 5 | 87 ± 11 | AD-1658541.2 | 13 ± 3 | 27 ± 3 | 49 ± 5 |
| AD-1633346.2 | 5 ± 1 | 13 ± 3 | 27 ± 6 | AD-1658542.2 | 5 ± 1 | 16 ± 5 | 20 ± 4 |
| AD-1633409.2 | 4 ± 0 | 12 ± 4 | 21 ± 4 | AD-1658605.2 | 4 ± 1 | 13 ± 5 | 23 ± 1 |
| AD-1633453.2 | 67 ± 7 | 81 ± 13 | 102 ± 6 | AD-1658650.2 | 25 ± 1 | 53 ± 3 | 82 ± 6 |
| AD-1633464.2 | 14 ± 1 | 38 ± 4 | 67 ± 3 | AD-1658661.2 | 5 ± 1 | 14 ± 2 | 27 ± 3 |
| AD-1633465.2 | 5 ± 1 | 15 ± 3 | 39 ± 3 | AD-1658662.2 | 4 ± 3 | 10 ± 6 | 12 ± 2 |
| AD-1633466.2 | 11 ± 2 | 34 ± 10 | 61 ± 5 | AD-1658663.2 | 3 ± 1 | 10 ± 1 | 19 ± 0 |
| AD-1633467.2 | 6 ± 2 | 22 ± 1 | 39 ± 6 | AD-1658664.2 | 3 ± 1 | 8 ± 2 | 13 ± 2 |
| AD-1633468.2 | 85 ± 8 | 104 ± 9 | 114 ± 3 | AD-1658665.2 | 52 ± 6 | 67 ± 5 | 89 ± 7 |
| AD-1633604.2 | 82 ± 13 | 103 ± 14 | 118 ± 17 | AD-1658801.2 | 51 ± 6 | 75 ± 6 | 106 ± 12 |
| AD-1633621.2 | 4 ± 1 | 8 ± 1 | 21 ± 2 | AD-1658818.2 | 3 ± 1 | 7 ± 2 | 16 ± 2 |
| AD-1633622.2 | 24 ± 5 | 53 ± 5 | 84 ± 10 | AD-1658819.2 | 25 ± 4 | 48 ± 13 | 75 ± 7 |
| AD-1633623.2 | 46 ± 4 | 75 ± 9 | 118 ± 6 | AD-1658820.2 | 10 ± 2 | 35 ± 4 | 58 ± 6 |
| AD-1633627.2 | 6 ± 1 | 20 ± 4 | 34 ± 1 | AD-1658824.2 | 4 ± 1 | 8 ± 2 | 19 ± 3 |
| AD-1633628.2 | 4 ± 1 | 11 ± 2 | 19 ± 2 | AD-1658825.2 | 2 ± 1 | 7 ± 1 | 14 ± 3 |
| AD-1633630.2 | 41 ± 7 | 56 ± 5 | 67 ± 15 | AD-1658827.2 | 15 ± 2 | 20 ± 5 | 53 ± 9 |
| AD-1633631.2 | 5 ± 1 | 11 ± 2 | 22 ± 4 | AD-1658828.2 | 3 ± 1 | 6 ± 1 | 10 ± 2 |
| AD-1633632.2 | 3 ± 1 | 8 ± 1 | 17 ± 2 | AD-1658829.2 | 3 ± 1 | 9 ± 3 | 17 ± 5 |
| AD-1633633.1 | 4 ± 1 | 9 ± 1 | 33 ± 9 | AD-1658830.1 | 3 ± 1 | 9 ± 2 | 20 ± 6 |
| AD-1633634.1 | 3 ± 1 | 5 ± 1 | 19 ± 4 | AD-1658831.1 | 1 ± 0 | 2 ± 0 | 6 ± 2 |
| AD-1633635.1 | 20 ± 3 | 36 ± 6 | 71 ± 8 | AD-1658832.1 | 4 ± 1 | 10 ± 2 | 29 ± 4 |
| AD-1633636.1 | 1 ± 0 | 2 ± 0 | 6 ± 1 | AD-1658833.1 | 1 ± 0 | 1 ± 0 | 4 ± 1 |
| AD-1633637.1 | 9 ± 1 | 25 ± 7 | 54 ± 17 | AD-1658834.1 | 2 ± 1 | 2 ± 0 | 5 ± 2 |
| AD-1633638.1 | 24 ± 5 | 36 ± 9 | 71 ± 10 | AD-1658835.1 | 7 ± 1 | 13 ± 1 | 30 ± 6 |
| AD-1633639.1 | 1 ± 0 | 2 ± 0 | 5 ± 1 | AD-1658836.1 | 3 ± 1 | 5 ± 2 | 12 ± 4 |
| AD-1633640.1 | 4 ± 1 | 6 ± 1 | 17 ± 1 | AD-1658837.1 | 3 ± 0 | 5 ± 1 | 18 ± 5 |
| AD-1633641.1 | 7 ± 3 | 17 ± 3 | 31 ± 8 | AD-1658838.1 | 2 ± 0 | 3 ± 1 | 8 ± 1 |
| AD-1633642.1 | 39 ± 7 | 65 ± 11 | 71 ± 12 | AD-1658839.1 | 2 ± 1 | 4 ± 1 | 10 ± 2 |
| AD-1633643.1 | 23 ± 1 | 39 ± 9 | 70 ± 14 | AD-1658840.1 | 8 ± 2 | 10 ± 2 | 34 ± 8 |
| AD-1633644.1 | 3 ± 0 | 8 ± 2 | 25 ± 4 | AD-1658841.1 | 2 ± 1 | 8 ± 1 | 16 ± 4 |
| AD-1633645.1 | 9 ± 2 | 20 ± 3 | 37 ± 5 | AD-1658842.1 | 2 ± 1 | 3 ± 1 | 8 ± 2 |
| AD-1633646.1 | 42 ± 6 | 48 ± 8 | 55 ± 8 | AD-1658843.1 | 19 ± 5 | 28 ± 3 | 48 ± 4 |
| AD-1633647.1 | 87 ± 9 | 78 ± 10 | 89 ± 9 | AD-1658844.1 | 66 ± 12 | 81 ± 11 | 93 ± 8 |
| AD-1633648.1 | 8 ± 3 | 13 ± 3 | 32 ± 4 | AD-1658845.1 | 2 ± 0 | 5 ± 0 | 14 ± 1 |
| AD-1633649.1 | 27 ± 3 | 48 ± 8 | 87 ± 3 | AD-1658846.1 | 2 ± 1 | 7 ± 3 | 19 ± 5 |
| AD-1633650.1 | 31 ± 8 | 54 ± 7 | 82 ± 8 | AD-1658847.1 | 17 ± 8 | 30 ± 5 | 53 ± 4 |
| AD-1633651.1 | 44 ± 6 | 63 ± 4 | 75 ± 8 | AD-1658848.1 | 19 ± 3 | 32 ± 5 | 53 ± 4 |
| AD-1633652.1 | 10 ± 1 | 18 ± 5 | 28 ± 3 | AD-1658849.1 | 17 ± 3 | 25 ± 4 | 46 ± 6 |
| AD-84707.2 | 2 ± 1 | 5 ± 2 | 12 ± 2 | AD-1321390.2 | 2 ± 0 | 3 ± 1 | 8 ± 2 |
| AD-1633653.1 | 6 ± 1 | 15 ± 3 | 28 ± 7 | AD-1658850.1 | 5 ± 1 | 10 ± 3 | 16 ± 4 |
| AD-1633678.1 | 113 ± 6 | 99 ± 13 | 96 ± 9 | AD-1658875.1 | 67 ± 7 | 103 ± 12 | 95 ± 2 |
| AD-1633683.1 | 114 ± 14 | 118 ± 4 | 110 ± 8 | AD-1658880.1 | 88 ± 8 | 96 ± 11 | 98 ± 10 |
| AD-1633732.1 | 1 ± 0 | 3 ± 1 | 5 ± 2 | AD-1658929.1 | 2 ± 1 | 5 ± 1 | 6 ± 2 |
| AD-1633733.1 | 6 ± 2 | 10 ± 2 | 20 ± 2 | AD-1658930.1 | 4 ± 1 | 8 ± 3 | 15 ± 2 |
| AD-1633734.1 | 20 ± 3 | 32 ± 4 | 51 ± 6 | AD-1658931.1 | 2 ± 0 | 3 ± 0 | 5 ± 2 |
| AD-1633735.1 | 12 ± 4 | 21 ± 1 | 38 ± 6 | AD-1658932.1 | 3 ± 1 | 9 ± 1 | 21 ± 5 |
| AD-1633736.1 | 5 ± 1 | 8 ± 1 | 20 ± 2 | AD-1658933.1 | 1 ± 0 | 2 ± 1 | 4 ± 1 |
| AD-1633737.1 | 27 ± 3 | 41 ± 2 | 63 ± 5 | AD-1658934.1 | 3 ± 1 | 8 ± 2 | 19 ± 3 |
| AD-1633738.1 | 36 ± 3 | 47 ± 2 | 66 ± 3 | AD-1658935.1 | 9 ± 2 | 15 ± 2 | 31 ± 5 |
| AD-1633739.1 | 2 ± 1 | 4 ± 1 | 8 ± 2 | AD-1658936.1 | 1 ± 0 | 2 ± 1 | 4 ± 1 |
| AD-1633740.1 | 1 ± 0 | 2 ± 0 | 4 ± 1 | AD-1658937.1 | 2 ± 0 | 2 ± 0 | 3 ± 1 |
| AD-1633741.1 | 5 ± 1 | 10 ± 2 | 22 ± 2 | AD-1658938.1 | 2 ± 0 | 4 ± 0 | 6 ± 1 |
| AD-1633742.1 | 12 ± 1 | 22 ± 2 | 37 ± 8 | AD-1658939.1 | 5 ± 1 | 8 ± 1 | 16 ± 1 |
| AD-1633743.1 | 5 ± 2 | 6 ± 2 | 14 ± 3 | AD-1658940.1 | 4 ± 1 | 6 ± 1 | 8 ± 2 |
| AD-1633759.1 | 1 ± 0 | 2 ± 1 | 4 ± 1 | AD-1658954.1 | 1 ± 0 | 2 ± 1 | 3 ± 2 |
| AD-1684522.1 | 4 ± 2 | 7 ± 2 | 13 ± 3 | AD-1658955.1 | 3 ± 1 | 6 ± 1 | 9 ± 2 |
| AD-1684523.1 | 3 ± 1 | 6 ± 1 | 7 ± 2 | AD-1658956.1 | 3 ± 1 | 5 ± 1 | 7 ± 1 |
| AD-1684524.1 | 2 ± 1 | 3 ± 1 | 8 ± 2 | AD-1658957.1 | 2 ± 0 | 3 ± 1 | 5 ± 1 |
| AD-1684525.1 | 15 ± 5 | 18 ± 4 | 34 ± 5 | AD-1658958.1 | 2 ± 1 | 4 ± 2 | 5 ± 3 |
| AD-1684526.1 | 2 ± 1 | 3 ± 1 | 7 ± 1 | AD-1658959.1 | 1 ± 0 | 1 ± 0 | 2 ± 1 |
| AD-1684527.1 | 1 ± 1 | 3 ± 1 | 4 ± 1 | AD-1658960.1 | 1 ± 1 | 2 ± 1 | 3 ± 1 |
| AD-1633777.1 | 14 ± 3 | 18 ± 3 | 38 ± 5 | AD-1658992.1 | 2 ± 1 | 5 ± 1 | 16 ± 2 |
| AD-1633779.1 | 11 ± 4 | 27 ± 7 | 41 ± 7 | AD-1658994.1 | 3 ± 1 | 6 ± 1 | 19 ± 4 |
| AD-1633780.1 | 30 ± 5 | 52 ± 8 | 61 ± 11 | AD-1658995.1 | 51 ± 6 | 52 ± 7 | 55 ± 9 |
| AD-1633840.1 | 66 ± 13 | 91 ± 7 | 99 ± 13 | AD-1659055.1 | 7 ± 1 | 19 ± 3 | 25 ± 3 |
| AD-1633841.1 | 96 ± 13 | 99 ± 25 | 88 ± 9 | AD-1659056.1 | 93 ± 10 | 103 ± 9 | 92 ± 11 |
| AD-1633842.1 | 4 ± 2 | 22 ± 6 | 49 ± 10 | AD-1659057.1 | 2 ± 1 | 13 ± 3 | 31 ± 5 |
| AD-1633843.1 | 6 ± 1 | 36 ± 2 | 55 ± 13 | AD-1659058.1 | 3 ± 1 | 12 ± 2 | 37 ± 7 |
| AD-1633844.1 | 22 ± 3 | 47 ± 10 | 81 ± 9 | AD-1659059.1 | 5 ± 1 | 27 ± 6 | 54 ± 8 |
| AD-1633845.1 | 28 ± 4 | 83 ± 9 | 71 ± 7 | AD-1659060.1 | 14 ± 2 | 41 ± 5 | 65 ± 13 |
| AD-1633846.1 | 10 ± 2 | 32 ± 6 | 58 ± 14 | AD-1659061.1 | 1 ± 0 | 12 ± 3 | 22 ± 8 |
| AD-84712.2 | 2 ± 0 | 8 ± 1 | 17 ± 4 | AD-1659062.1 | 1 ± 0 | 6 ± 2 | 12 ± 3 |
| AD-1633847.1 | 14 ± 3 | 69 ± 10 | 86 ± 5 | AD-1659063.1 | 5 ± 1 | 28 ± 8 | 54 ± 4 |
| AD-1633848.1 | 12 ± 4 | 40 ± 2 | 80 ± 20 | AD-1659064.1 | 3 ± 1 | 22 ± 6 | 31 ± 1 |
| AD-1633849.1 | 8 ± 1 | 34 ± 3 | 64 ± 6 | AD-1659065.1 | 6 ± 2 | 21 ± 5 | 50 ± 12 |
| AD-1633850.1 | 2 ± 0 | 12 ± 3 | 23 ± 1 | AD-1659066.1 | 2 ± 1 | 9 ± 1 | 27 ± 2 |
| AD-1633851.1 | 6 ± 2 | 37 ± 5 | 52 ± 7 | AD-1659067.1 | 3 ± 0 | 24 ± 5 | 46 ± 8 |
| AD-1633852.1 | 8 ± 2 | 39 ± 5 | 62 ± 8 | AD-1659068.1 | 7 ± 1 | 20 ± 6 | 39 ± 4 |
| AD-1633853.1 | 1 ± 0 | 7 ± 2 | 17 ± 4 | AD-1659069.1 | 1 ± 0 | 3 ± 1 | 14 ± 3 |
| AD-1633854.1 | 22 ± 3 | 59 ± 9 | 85 ± 9 | AD-1659070.1 | 7 ± 2 | 27 ± 4 | 52 ± 12 |
| AD-1633855.1 | 21 ± 3 | 82 ± 14 | 91 ± 12 | AD-1659071.1 | 2 ± 0 | 13 ± 3 | 35 ± 5 |
| AD-1684528.1 | 7 ± 2 | 30 ± 5 | 61 ± 8 | AD-1684529.1 | 3 ± 0 | 12 ± 3 | 34 ± 7 |
| AD-1684530.1 | 3 ± 1 | 18 ± 1 | 45 ± 4 | AD-1684531.1 | 2 ± 0 | 9 ± 1 | 33 ± 5 |
| AD-1684532.1 | 7 ± 1 | 28 ± 3 | 44 ± 5 | AD-1684533.1 | 3 ± 1 | 19 ± 8 | 47 ± 11 |
| AD-1684534.1 | 3 ± 1 | 15 ± 1 | 30 ± 3 | AD-1684535.1 | 4 ± 3 | 4 ± 0 | 12 ± 2 |
| AD-1633946.1 | 3 ± 1 | 10 ± 3 | 22 ± 3 | AD-1659162.1 | 1 ± 0 | 6 ± 2 | 19 ± 4 |
| AD-67328.2 | 1 ± 0 | 7 ± 1 | 20 ± 3 | AD-1321384.2 | 3 ± 0 | 9 ± 1 | 22 ± 4 |
| AD-1633947.1 | 3 ± 1 | 10 ± 2 | 23 ± 1 | AD-1659163.1 | 2 ± 1 | 10 ± 1 | 22 ± 3 |
| AD-1633948.1 | 2 ± 1 | 17 ± 9 | 32 ± 5 | AD-1659164.1 | 1 ± 0 | 4 ± 1 | 11 ± 3 |
| AD-1633949.1 | 3 ± 1 | 21 ± 1 | 51 ± 8 | AD-1659165.1 | 3 ± 0 | 12 ± 2 | 23 ± 2 |
| AD-84700.2 | 11 ± 2 | 37 ± 3 | 66 ± 4 | AD-1659166.1 | 2 ± 0 | 12 ± 1 | 25 ± 4 |
| AD-1633950.1 | 1 ± 0 | 9 ± 2 | 29 ± 5 | AD-1659167.1 | 1 ± 0 | 6 ± 2 | 18 ± 2 |
| AD-1633951.1 | 5 ± 1 | 29 ± 6 | 60 ± 10 | AD-1659168.1 | 4 ± 1 | 15 ± 1 | 33 ± 7 |
| AD-1633991.1 | 3 ± 1 | 19 ± 3 | 46 ± 4 | AD-1659208.1 | 2 ± 0 | 11 ± 2 | 26 ± 4 |
| AD-1633992.1 | 14 ± 1 | 45 ± 5 | 77 ± 9 | AD-1659209.1 | 3 ± 1 | 8 ± 2 | 23 ± 5 |
| AD-1633993.1 | 27 ± 5 | 57 ± 10 | 73 ± 3 | AD-1659210.1 | 11 ± 1 | 43 ± 5 | 70 ± 8 |
| AD-1634065.1 | 13 ± 3 | 48 ± 6 | 79 ± 1 | AD-1659282.1 | 4 ± 1 | 18 ± 4 | 44 ± 6 |
| AD-1634066.1 | 45 ± 5 | 77 ± 9 | 98 ± 12 | AD-1659283.1 | 30 ± 2 | 69 ± 14 | 80 ± 11 |
| AD-1634067.1 | 25 ± 5 | 68 ± 6 | 87 ± 11 | AD-1659284.1 | 24 ± 4 | 60 ± 2 | 71 ± 3 |
| AD-1634068.1 | 10 ± 2 | 38 ± 4 | 58 ± 3 | AD-1659285.1 | 11 ± 1 | 38 ± 2 | 64 ± 5 |
| AD-84730.2 | 7 ± 1 | 19 ± 4 | 30 ± 8 | AD-1659286.1 | 5 ± 1 | 21 ± 7 | 41 ± 6 |
| AD-1634069.1 | 5 ± 1 | 19 ± 4 | 34 ± 6 | AD-1659287.1 | 2 ± 1 | 12 ± 2 | 22 ± 5 |
| AD-1634070.1 | 2 ± 1 | 12 ± 4 | 24 ± 4 | AD-1659288.1 | 3 ± 1 | 13 ± 3 | 22 ± 2 |
| AD-1634071.1 | 29 ± 3 | 65 ± 6 | 98 ± 16 | AD-1659289.1 | 24 ± 6 | 55 ± 8 | 79 ± 12 |
| AD-1684536.1 | 54 ± 6 | 83 ± 5 | 84 ± 5 | AD-1684537.1 | 75 ± 4 | 105 ± 5 | 109 ± 19 |
| AD-1684538.1 | 64 ± 6 | 103 ± 6 | 102 ± 20 | AD-1684539.1 | 61 ± 5 | 105 ± 8 | 83 ± 8 |
| AD-1684540.1 | 73 ± 5 | 65 ± 4 | 87 ± 9 | AD-1684541.1 | 57 ± 9 | 67 ± 10 | 96 ± 15 |
| AD-1684542.1 | 89 ± 22 | 65 ± 5 | 97 ± 9 | AD-1684543.1 | 85 ± 10 | 78 ± 1 | 104 ± 19 |
| AD-1684544.1 | 98 ± 15 | 87 ± 8 | 117 ± 19 | AD-1684545.1 | 56 ± 9 | 56 ± 6 | 94 ± 6 |
| AD-1684546.1 | 79 ± 9 | 84 ± 9 | 94 ± 12 | AD-1684547.1 | 23 ± 3 | 45 ± 3 | 64 ± 8 |
| AD-1684548.1 | 58 ± 9 | 62 ± 12 | 86 ± 18 | AD-1684549.1 | 16 ± 1 | 44 ± 8 | 57 ± 8 |
| AD-1684550.1 | 47 ± 7 | 63 ± 15 | 100 ± 17 | AD-1684551.1 | 37 ± 3 | 50 ± 7 | 80 ± 3 |
| AD-1684552.1 | 55 ± 5 | 74 ± 14 | 112 ± 20 | AD-1684553.1 | 31 ± 5 | 54 ± 7 | 76 ± 9 |
| AD-1684554.1 | 75 ± 8 | 98 ± 17 | 107 ± 18 | AD-1684555.1 | 25 ± 2 | 50 ± 9 | 53 ± 5 |
| AD-1684556.1 | 76 ± 10 | 82 ± 12 | 115 ± 26 | AD-1684557.1 | 26 ± 7 | 45 ± 8 | 75 ± 20 |
| AD-1684558.1 | 57 ± 9 | 65 ± 7 | 101 ± 14 | AD-1684559.1 | 21 ± 6 | 41 ± 5 | 69 ± 6 |
| AD-1634072.1 | 8 ± 1 | 19 ± 3 | 32 ± 8 | AD-1684560.1 | 6 ± 0 | 15 ± 3 | 25 ± 4 |
| AD-1634073.1 | 5 ± 1 | 13 ± 3 | 18 ± 3 | AD-1684561.1 | 3 ± 1 | 10 ± 1 | 11 ± 3 |
| AD-1634074.1 | 3 ± 0 | 8 ± 1 | 15 ± 3 | AD-1659290.1 | 3 ± 1 | 9 ± 1 | 15 ± 1 |
| AD-1634075.1 | 5 ± 1 | 15 ± 2 | 32 ± 9 | AD-1659291.1 | 5 ± 1 | 15 ± 2 | 19 ± 3 |
| AD-1634076.1 | 11 ± 2 | 36 ± 5 | 45 ± 4 | AD-1659292.1 | 9 ± 1 | 25 ± 5 | 37 ± 9 |
| AD-1634077.1 | 12 ± 2 | 30 ± 5 | 59 ± 8 | AD-1659293.1 | 3 ± 2 | 10 ± 2 | 16 ± 1 |
| AD-1634078.1 | 11 ± 3 | 29 ± 7 | 55 ± 8 | AD-1659294.1 | 5 ± 1 | 13 ± 3 | 24 ± 4 |
| AD-1634079.1 | 3 ± 1 | 10 ± 3 | 21 ± 4 | AD-1659295.1 | 2 ± 0 | 4 ± 0 | 11 ± 1 |
| AD-1634080.1 | 10 ± 3 | 34 ± 2 | 48 ± 7 | AD-1659296.1 | 6 ± 2 | 15 ± 2 | 35 ± 7 |
| AD-1634081.1 | 5 ± 1 | 20 ± 2 | 38 ± 8 | AD-1659297.1 | 14 ± 2 | 26 ± 2 | 52 ± 7 |
| AD-1634082.1 | 27 ± 3 | 60 ± 4 | 79 ± 11 | AD-1659298.1 | 17 ± 3 | 34 ± 6 | 60 ± 10 |
| AD-1634105.1 | 2 ± 0 | 4 ± 1 | 12 ± 2 | AD-1659321.1 | 2 ± 1 | 5 ± 0 | 15 ± 2 |
| AD-1634107.1 | 6 ± 2 | 21 ± 2 | 37 ± 9 | AD-1659323.1 | 6 ± 1 | 13 ± 3 | 25 ± 2 |
| AD-1634109.1 | 17 ± 2 | 40 ± 5 | 66 ± 8 | AD-1659325.1 | 7 ± 2 | 17 ± 3 | 39 ± 6 |
| AD-1634110.1 | 9 ± 2 | 26 ± 5 | 42 ± 2 | AD-1659326.1 | 6 ± 1 | 19 ± 1 | 41 ± 6 |
| AD-1634111.1 | 5 ± 2 | 11 ± 3 | 25 ± 3 | AD-1659327.1 | 3 ± 1 | 14 ± 1 | 18 ± 2 |
| AD-1634112.1 | 10 ± 1 | 32 ± 2 | 50 ± 9 | AD-1659328.1 | 3 ± 1 | 10 ± 1 | 24 ± 6 |
| AD-1634113.1 | 7 ± 2 | 17 ± 3 | 37 ± 4 | AD-1659329.1 | 4 ± 1 | 15 ± 1 | 29 ± 6 |
| AD-1634114.1 | 17 ± 5 | 33 ± 1 | 68 ± 8 | AD-1659330.1 | 2 ± 1 | 5 ± 1 | 11 ± 2 |
| AD-1634115.1 | 35 ± 5 | 63 ± 11 | 110 ± 7 | AD-1659331.1 | 7 ± 1 | 24 ± 4 | 43 ± 7 |
| AD-84724.2 | 24 ± 2 | 45 ± 6 | 61 ± 8 | AD-1659332.1 | 5 ± 1 | 11 ± 1 | 24 ± 2 |
| AD-1634116.1 | 5 ± 2 | 15 ± 3 | 33 ± 5 | AD-1659333.1 | 3 ± 2 | 9 ± 1 | 17 ± 3 |
| AD-1634117.1 | 9 ± 1 | 32 ± 3 | 45 ± 6 | AD-1659334.1 | 10 ± 3 | 29 ± 1 | 42 ± 6 |
| AD-1634118.1 | 25 ± 4 | 46 ± 5 | 79 ± 4 | AD-1659335.1 | 6 ± 1 | 20 ± 3 | 31 ± 4 |
| AD-68579.2 | 17 ± 5 | 41 ± 5 | 69 ± 6 | AD-1659336.1 | 3 ± 1 | 10 ± 2 | 17 ± 3 |
| AD-1634119.1 | 4 ± 1 | 14 ± 1 | 33 ± 4 | AD-1659337.1 | 3 ± 0 | 10 ± 2 | 21 ± 2 |
| AD-1634120.1 | 11 ± 3 | 33 ± 6 | 80 ± 5 | AD-1659338.1 | 3 ± 1 | 8 ± 3 | 20 ± 1 |
| AD-1634121.1 | 8 ± 2 | 22 ± 6 | 44 ± 4 | AD-1659339.1 | 2 ± 1 | 6 ± 1 | 18 ± 3 |
| AD-1634122.1 | 18 ± 13 | 29 ± 2 | 60 ± 7 | AD-1659340.1 | 2 ± 0 | 15 ± 3 | 24 ± 4 |
| AD-1634123.1 | 4 ± 1 | 14 ± 3 | 41 ± 1 | AD-1659341.1 | 6 ± 1 | 23 ± 3 | 46 ± 8 |
| AD-1634124.1 | 5 ± 1 | 17 ± 6 | 32 ± 5 | AD-1659342.1 | 3 ± 0 | 12 ± 2 | 19 ± 3 |
| AD-1634125.1 | 4 ± 1 | 11 ± 2 | 22 ± 2 | AD-1659343.1 | 4 ± 1 | 10 ± 3 | 26 ± 5 |
| AD-1634126.1 | 6 ± 1 | 16 ± 4 | 30 ± 4 | AD-1659344.1 | 2 ± 0 | 8 ± 1 | 16 ± 3 |
| AD-1634127.1 | 3 ± 0 | 7 ± 2 | 16 ± 1 | AD-1659345.1 | 3 ± 0 | 6 ± 1 | 12 ± 2 |
| AD-1634128.1 | 1 ± 0 | 1 ± 1 | 3 ± 2 | AD-1659346.1 | 1 ± 0 | 2 ± 1 | 5 ± 1 |
| AD-1634129.1 | 2 ± 1 | 6 ± 3 | 15 ± 2 | AD-1659347.1 | 1 ± 0 | 1 ± 0 | 5 ± 2 |
| AD-1634130.1 | 4 ± 1 | 13 ± 1 | 24 ± 4 | AD-1659348.1 | 1 ± 1 | 1 ± 0 | 3 ± 1 |
| AD-1684562.1 | 16 ± 4 | 33 ± 3 | 54 ± 7 | AD-1659349.1 | 9 ± 2 | 23 ± 2 | 40 ± 1 |
| AD-1684563.1 | 1 ± 0 | 1 ± 1 | 3 ± 0 | AD-1659350.1 | 1 ± 0 | 1 ± 1 | 2 ± 1 |
| AD-1684564.1 | 1 ± 0 | 2 ± 1 | 2 ± 1 | AD-1659351.1 | 1 ± 0 | 1 ± 0 | 1 ± 0 |
| AD-1634135.1 | 2 ± 1 | 7 ± 1 | 13 ± 4 | AD-1659371.1 | 1 ± 0 | 2 ± 1 | 4 ± 1 |
| AD-1634136.1 | 2 ± 1 | 7 ± 3 | 12 ± 1 | AD-1659372.1 | 3 ± 1 | 9 ± 1 | 21 ± 4 |
| AD-1634137.1 | 1 ± 0 | 2 ± 0 | 2 ± 1 | AD-1659373.1 | 1 ± 1 | 2 ± 1 | 3 ± 1 |
| AD-1634146.1 | 1 ± 0 | 2 ± 0 | 3 ± 1 | AD-1659382.1 | 1 ± 0 | 1 ± 0 | 1 ± 0 |
| AD-1634147.1 | 1 ± 0 | 4 ± 1 | 10 ± 3 | AD-1659383.1 | 1 ± 1 | 2 ± 0 | 2 ± 0 |
| AD-68585.2 | 5 ± 2 | 20 ± 2 | 29 ± 4 | AD-1659384.1 | 2 ± 1 | 7 ± 1 | 11 ± 5 |
| AD-1634148.1 | 2 ± 0 | 5 ± 1 | 9 ± 2 | AD-1659385.1 | 1 ± 0 | 1 ± 0 | 1 ± 0 |
| AD-1634149.1 | 1 ± 0 | 1 ± 0 | 3 ± 1 | AD-1659386.1 | 1 ± 0 | 1 ± 0 | 3 ± 0 |
| AD-1634150.1 | 1 ± 0 | 1 ± 0 | 4 ± 1 | AD-1659387.1 | 1 ± 0 | 1 ± 0 | 2 ± 1 |
| AD-1634151.1 | 0 ± 0 | 1 ± 0 | 2 ± 0 | AD-1659388.1 | 0 ± 0 | 1 ± 0 | 1 ± 0 |
| AD-1634152.1 | 1 ± 0 | 1 ± 0 | 2 ± 1 | AD-1659389.1 | 1 ± 0 | 1 ± 0 | 2 ± 0 |
| AD-1634153.1 | 2 ± 1 | 2 ± 1 | 5 ± 1 | AD-1659390.1 | 1 ± 0 | 2 ± 0 | 5 ± 2 |
| AD-1634162.1 | 3 ± 0 | 5 ± 2 | 12 ± 2 | AD-1659399.1 | 3 ± 1 | 5 ± 1 | 8 ± 1 |
| AD-1634163.1 | 4 ± 0 | 11 ± 2 | 18 ± 3 | AD-1659400.1 | 9 ± 2 | 18 ± 5 | 30 ± 3 |
| AD-1634164.1 | 29 ± 6 | 35 ± 3 | 48 ± 7 | AD-1659401.1 | 26 ± 1 | 23 ± 3 | 33 ± 4 |
| AD-1634165.1 | 19 ± 3 | 19 ± 2 | 30 ± 5 | AD-1659402.1 | 20 ± 3 | 20 ± 5 | 24 ± 3 |
| AD-1634169.1 | 65 ± 4 | 70 ± 7 | 79 ± 5 | AD-1659406.1 | 63 ± 18 | 59 ± 11 | 53 ± 6 |
| AD-1634170.1 | 84 ± 13 | 74 ± 9 | 72 ± 1 | AD-1659407.1 | 58 ± 5 | 69 ± 8 | 68 ± 6 |
| AD-1634171.1 | 81 ± 15 | 75 ± 8 | 85 ± 7 | AD-1659408.1 | 86 ± 25 | 91 ± 9 | 81 ± 5 |
| AD-1634172.1 | 50 ± 13 | 53 ± 7 | 67 ± 8 | AD-1659409.1 | 58 ± 4 | 68 ± 6 | 65 ± 7 |
| AD-1634173.1 | 60 ± 5 | 61 ± 5 | 56 ± 7 | AD-1659410.1 | 49 ± 6 | 49 ± 2 | 52 ± 7 |
| AD-1634174.1 | 69 ± 2 | 73 ± 5 | 77 ± 9 | AD-1659411.1 | 36 ± 3 | 37 ± 4 | 39 ± 2 |
| AD-1634175.1 | 61 ± 9 | 70 ± 9 | 81 ± 8 | AD-1659412.1 | 36 ± 4 | 41 ± 7 | 42 ± 5 |
| AD-1634176.1 | 70 ± 5 | 82 ± 5 | 88 ± 7 | AD-1659413.1 | 64 ± 9 | 68 ± 4 | 74 ± 6 |
| AD-1634177.1 | 57 ± 12 | 65 ± 9 | 67 ± 4 | AD-1659414.1 | 52 ± 10 | 67 ± 3 | 67 ± 3 |
| AD-1634178.1 | 63 ± 8 | 76 ± 6 | 74 ± 4 | AD-1659415.1 | 58 ± 5 | 76 ± 4 | 67 ± 9 |
| AD-1634179.1 | 79 ± 11 | 83 ± 18 | 103 ± 9 | AD-1659416.1 | 65 ± 6 | 86 ± 7 | 92 ± 7 |
| AD-1634180.1 | 47 ± 7 | 67 ± 10 | 72 ± 14 | AD-1659417.1 | 58 ± 11 | 74 ± 7 | 73 ± 15 |
| AD-1634181.1 | 71 ± 11 | 79 ± 6 | 72 ± 16 | AD-1659418.1 | 54 ± 9 | 69 ± 7 | 56 ± 13 |
| AD-1634182.1 | 62 ± 5 | 77 ± 3 | 86 ± 4 | AD-1659419.1 | 57 ± 17 | 68 ± 7 | 76 ± 7 |
| AD-1634183.1 | 61 ± 11 | 70 ± 11 | 81 ± 11 | AD-1659420.1 | 63 ± 8 | 79 ± 11 | 86 ± 5 |
| AD-1634184.1 | 64 ± 12 | 74 ± 9 | 80 ± 16 | AD-1659421.1 | 33 ± 3 | 56 ± 8 | 62 ± 10 |
| AD-1634185.1 | 58 ± 9 | 71 ± 9 | 76 ± 12 | AD-1659422.1 | 58 ± 7 | 72 ± 18 | 61 ± 6 |
| AD-1634186.1 | 60 ± 9 | 86 ± 12 | 86 ± 10 | AD-1659423.1 | 62 ± 11 | 81 ± 15 | 82 ± 9 |
| AD-1634187.1 | 43 ± 10 | 51 ± 9 | 42 ± 8 | AD-1659424.1 | 81 ± 9 | 92 ± 11 | 82 ± 27 |
| AD-1634188.1 | 37 ± 5 | 53 ± 8 | 48 ± 10 | AD-1659425.1 | 42 ± 8 | 52 ± 14 | 73 ± 4 |
| AD-1634189.1 | 49 ± 5 | 70 ± 17 | 87 ± 8 | AD-1659426.1 | 47 ± 9 | 51 ± 9 | 67 ± 5 |
| AD-1634190.1 | 50 ± 9 | 56 ± 10 | 72 ± 5 | AD-1659427.1 | 46 ± 6 | 59 ± 16 | 76 ± 9 |
| AD-1634191.1 | 44 ± 3 | 56 ± 7 | 65 ± 7 | AD-1659428.1 | 56 ± 6 | 50 ± 8 | 80 ± 15 |
| AD-1634192.1 | 45 ± 10 | 49 ± 5 | 61 ± 5 | AD-1659429.1 | 34 ± 5 | 42 ± 7 | 50 ± 5 |
| AD-1634193.1 | 47 ± 10 | 42 ± 8 | 62 ± 10 | AD-1659430.1 | 63 ± 6 | 47 ± 7 | 69 ± 11 |
| AD-1634194.1 | 49 ± 2 | 53 ± 2 | 62 ± 7 | AD-1659431.1 | 49 ± 8 | 50 ± 7 | 63 ± 11 |
| AD-1634195.1 | 52 ± 6 | 59 ± 11 | 80 ± 7 | AD-1659432.1 | 59 ± 5 | 73 ± 7 | 82 ± 13 |
| AD-1634196.1 | 57 ± 7 | 49 ± 3 | 71 ± 11 | AD-1659433.1 | 50 ± 12 | 43 ± 7 | 68 ± 11 |
| AD-1634197.1 | 52 ± 3 | 62 ± 4 | 70 ± 11 | AD-1659434.1 | 52 ± 5 | 63 ± 5 | 72 ± 8 |
| AD-1634199.1 | 61 ± 8 | 51 ± 5 | 60 ± 13 | AD-1659436.1 | 65 ± 5 | 53 ± 3 | 78 ± 8 |
| AD-1634200.1 | 62 ± 8 | 50 ± 5 | 73 ± 15 | AD-1659437.1 | 57 ± 4 | 61 ± 3 | 55 ± 5 |
| AD-1634203.1 | 77 ± 3 | 63 ± 7 | 86 ± 6 | AD-1659440.1 | 65 ± 4 | 54 ± 6 | 64 ± 13 |
| AD-1634209.1 | 91 ± 15 | 74 ± 8 | 112 ± 17 | AD-1659446.1 | 78 ± 8 | 69 ± 3 | 88 ± 12 |
| AD-1634210.1 | 73 ± 6 | 65 ± 6 | 85 ± 9 | AD-1659447.1 | 72 ± 5 | 68 ± 6 | 93 ± 10 |
| AD-1634211.1 | 74 ± 13 | 69 ± 8 | 85 ± 8 | AD-1659448.1 | 66 ± 12 | 50 ± 9 | 78 ± 9 |
| AD-1634212.1 | 43 ± 3 | 45 ± 3 | 68 ± 8 | AD-1659449.1 | 68 ± 3 | 61 ± 5 | 91 ± 9 |
| AD-1634213.1 | 71 ± 2 | 77 ± 17 | 98 ± 21 | AD-1659450.1 | 73 ± 2 | 61 ± 6 | 103 ± 10 |
| AD-1634214.1 | 85 ± 7 | 59 ± 5 | 85 ± 15 | AD-1659451.1 | 52 ± 9 | 49 ± 9 | 56 ± 7 |
| AD-1634215.1 | 82 ± 5 | 79 ± 9 | 108 ± 9 | AD-1659452.1 | 67 ± 8 | 59 ± 6 | 83 ± 6 |
| AD-1634216.1 | 76 ± 9 | 70 ± 6 | 113 ± 7 | AD-1659453.1 | 77 ± 10 | 64 ± 3 | 90 ± 12 |
| AD-1634217.1 | 92 ± 6 | 83 ± 1 | 116 ± 15 | AD-1659454.1 | 75 ± 4 | 70 ± 6 | 101 ± 6 |
| AD-1684565.1 | 85 ± 7 | 104 ± 15 | 84 ± 14 | AD-1659481.1 | 49 ± 5 | 49 ± 5 | 61 ± 5 |
| AD-1684566.1 | 122 ± 27 | 74 ± 9 | 98 ± 5 | AD-1659482.1 | 67 ± 6 | 51 ± 4 | 108 ± 15 |
| AD-1684567.1 | 85 ± 10 | 74 ± 7 | 98 ± 7 | AD-1659483.1 | 89 ± 2 | 77 ± 9 | 102 ± 5 |
| AD-1684568.1 | 71 ± 6 | 82 ± 12 | 107 ± 14 | AD-1659485.1 | 67 ± 4 | 60 ± 6 | 91 ± 11 |
| AD-1684569.1 | 68 ± 2 | 80 ± 4 | 100 ± 5 | AD-1659487.1 | 68 ± 7 | 88 ± 15 | 91 ± 13 |
| AD-1684570.1 | 78 ± 7 | 83 ± 6 | 123 ± 12 | AD-1659488.1 | 79 ± 7 | 87 ± 13 | 111 ± 9 |
| AD-1634234.1 | 45 ± 8 | 73 ± 12 | 91 ± 5 | AD-1659489.1 | 81 ± 5 | 75 ± 10 | 97 ± 7 |
| AD-1634235.1 | 65 ± 9 | 72 ± 6 | 91 ± 4 | AD-1659490.1 | 47 ± 2 | 68 ± 4 | 89 ± 15 |
| AD-1634236.1 | 70 ± 8 | 75 ± 9 | 96 ± 15 | AD-1659491.1 | 32 ± 6 | 39 ± 3 | 48 ± 5 |
| AD-1634237.1 | 75 ± 7 | 86 ± 14 | 113 ± 11 | AD-1659492.1 | 36 ± 7 | 40 ± 4 | 48 ± 4 |
| AD-1634238.1 | 79 ± 13 | 91 ± 11 | 96 ± 12 | AD-1659493.1 | 74 ± 3 | 78 ± 4 | 104 ± 5 |
| AD-1634282.1 | 64 ± 7 | 58 ± 8 | 72 ± 6 | AD-1659537.1 | 63 ± 9 | 51 ± 8 | 61 ± 6 |
| AD-1634283.1 | 76 ± 8 | 66 ± 3 | 97 ± 18 | AD-1659538.1 | 59 ± 2 | 55 ± 5 | 71 ± 4 |
| AD-1634304.1 | 69 ± 7 | 68 ± 8 | 102 ± 16 | AD-1659559.1 | 70 ± 7 | 61 ± 11 | 85 ± 14 |
| AD-1634305.1 | 51 ± 3 | 44 ± 4 | 50 ± 12 | AD-1659560.1 | 49 ± 3 | 59 ± 3 | 55 ± 4 |
| AD-1634306.1 | 61 ± 5 | 65 ± 5 | 74 ± 4 | AD-1659561.1 | 51 ± 5 | 39 ± 5 | 73 ± 5 |
| AD-1634307.1 | 83 ± 7 | 80 ± 7 | 103 ± 2 | AD-1659562.1 | 74 ± 5 | 66 ± 8 | 93 ± 7 |
| AD-1634308.1 | 61 ± 4 | 73 ± 7 | 82 ± 7 | AD-1659563.1 | 69 ± 3 | 72 ± 4 | 98 ± 8 |
| AD-1634327.1 | 61 ± 8 | 64 ± 7 | 80 ± 15 | AD-1659582.1 | 49 ± 9 | 52 ± 2 | 74 ± 10 |
| AD-1634328.1 | 64 ± 6 | 64 ± 9 | 91 ± 4 | AD-1659583.1 | 44 ± 3 | 56 ± 4 | 70 ± 5 |
| AD-1634329.1 | 65 ± 3 | 64 ± 7 | 85 ± 5 | AD-1659584.1 | 60 ± 5 | 61 ± 9 | 88 ± 11 |
| AD-1634330.1 | 56 ± 2 | 50 ± 6 | 54 ± 11 | AD-1659585.1 | 72 ± 2 | 65 ± 7 | 81 ± 8 |
| AD-1634331.1 | 44 ± 10 | 31 ± 6 | 49 ± 9 | AD-1659586.1 | 53 ± 7 | 51 ± 9 | 72 ± 7 |
| AD-1634332.1 | 46 ± 10 | 49 ± 13 | 81 ± 3 | AD-1659587.1 | 34 ± 6 | 57 ± 1 | 52 ± 17 |
| AD-1634333.1 | 67 ± 10 | 59 ± 15 | 84 ± 13 | AD-1659588.1 | 64 ± 3 | 62 ± 11 | 97 ± 13 |

### In Vivo Mouse and Cyno Studies

[0441] All studies were conducted using protocols consistent with local, state and federal regulations as applicable and approved by the Institutional Animal Care and Use Committees (IACUCs) at Alnylam Pharmaceuticals.

[0442] In mouse pharmacodynamic studies, female C57BL/6 mice (Charles River Laboratories) were administered a single dose of a vehicle control (1× PBS or 0.9% sodium chloride) or siRNA subcutaneously in the upper back. Bleeds were collected by retro-orbital bleeding. Serum were separated by centrifuging at 13000 rpm at room temperature for 10 mins. Mouse livers were collected and immediately snap frozen in liquid nitrogen, and stored at −80° C. for mRNA and siRNA analysis.

[0443] As shown in FIGS. 2A-2D and 10A-10D, the results demonstrate an improved or similar target knockdown in mice and an improved or similar target knockdown and duration of silencing in cyno.

### Serum Protein Quantification

[0444] TTR protein was quantified by ELISA from serum isolated from whole blood. ELISA was performed according to manufacturer protocol (ALPCO, 41-PALMS-EO1) after a 3025-fold dilution of the serum samples. Data were normalized to pre-bleed TTR levels. All samples were assayed in duplicate and each data point is the average of all the mice within each cohort (n=3).

[0445] In some embodiments, the dsRNA molecule is not a dsRNA molecule listed in any one of Tables 15-25.

TABLE 15
Exemplary dsRNA molecules

| | | SEQ | | SEQ |
|---|---|---|---|---|
| | | ID | | ID |
| Duplex ID | Sense sequence (5′→3′) | NO: | Antisense sequence (5′→3′) | NO: |
| AD-1353484.1 | asasaag(Ahd)gaAfAfGfuguuuuausasa | 2141 | VPusdTsaudAadAacacdTuUfcucuuuuscsu | 2166 |
| AD-1353468.1 | asasaga(Chd)ugAfUfAfcagaacgasusa | 2142 | VPusdAsucdGudTcugudAuCfagucuuuscsc | 2167 |
| AD-1353485.1 | asasagagaaAfGfUfguuu(Uhd)auasusa | 2143 | VPusdAsuadTadAaacadCuUfucucuuususc | 2168 |
| AD-1353483.1 | asascag(Uhd)gcUfAfAfuguuauugsgsa | 2144 | VPusdCscadAudAacaudTaGfcacuguusgsg | 2169 |
| AD-1353486.1 | asasgag(Ahd)aaGfUfGfuuuuauausasa | 2145 | VPusdTsaudAudAaaacdAcUfuucucuususu | 2170 |
| AD-1353479.1 | asasuuggauUfCfGfccau(Uhd)uuasusa | 2146 | VPusdAsuadAadAuggcdGaAfuccaauuscsc | 2171 |
| AD-1353473.1 | ascsaga(Ahd)caGfUfCfcuuaauccsasa | 2147 | VPusdTsggdAudTaaggdAcUfguucuguscsg | 2172 |
| AD-1353467.1 | ascscaggaaAfGfAfcuga(Uhd)acasgsa | 2148 | VPusdCsugdTadTcagudCuUfuccuggusgsc | 2173 |
| AD-1353482.1 | asgsauu(Ahd)gaGfAfGfuuuuauuuscsa | 2149 | VPusdGsaadAudAaaacdTcUfcuaaucususc | 2174 |
| AD-1353480.1 | asusugg(Ahd)uuCfGfCfcauuuuaususa | 2150 | VPusdAsaudAadAauggdCgAfauccaaususc | 2175 |
| AD-1353463.1 | csasuca(Chd)caUfGfCfagauuaugscsa | 2151 | VPusdGscadTadAucugdCaUfggugaugsusu | 2176 |
| AD-1353478.1 | cscsucu(Uhd)ggAfAfUfuggauucgscsa | 2152 | VPusdGscgdAadTccaadTuCfcaagaggsgsc | 2177 |
| AD-1353466.1 | csusacagcaCfAfAfcaaa(Uhd)gugsasa | 2153 | VPusdTscadCadTuugudTgUfgcuguagsgsg | 2178 |
| AD-1353488.1 | gsasaag(Uhd)guUfUfUfauauacggsusa | 2154 | VPusdAsccdGudAuauadAaAfcacuuucsusc | 2179 |
| AD-1353487.1 | gsasgaa(Ahd)guGfUfUfuuauauacsgsa | 2155 | VPusdCsgudAudAuaaadAcAfcuuucucsusu | 2180 |
| AD-1353481.1 | gsasuucgccAfUfUfuuau(Uhd)uuuscsa | 2156 | VPusdGsaadAadAuaaadAuGfgcgaaucscsg | 2181 |
| AD-1353477.1 | gsusccu(Uhd)aaUfCfCfagaaaccusgsa | 2157 | VPusdCsagdGudTucugdGaUfuaaggacsusg | 2182 |
| AD-1353489.1 | gsusguu(Uhd)uaUfAfUfacgguacususa | 2158 | VPusdAsagdTadCcguadTaUfaaaacacsusu | 2183 |
| AD-1353491.1 | usasgac(Ahd)uuGfCfUfauucuguususa | 2159 | VPusdAsaadCadGaauadGcAfaugucuasusu | 2184 |
| AD-1397058 | csusacagcaCfAfAfcaaa(Uhd)gugaaL96 | 2160 | VPusdTscadCadTuugudTgUfgcuguagsgsg | 2178 |
| AD-1397059 | asasaga(Chd)ugAfUfAfcagaacgauaL96 | 2161 | VPusdAsucdGudTcugudAuCfagucuuuscsc | 2167 |
| AD-1397064 | asusugg(Ahd)uuCfGfCfcauuuuauuaL96 | 2162 | VPusdAsaudAadAauggdCgAfauccaaususc | 2175 |
| AD-1397065 | gsasuucgccAfUfUfuuau(Uhd)uuucaL96 | 2163 | VPusdGsaadAadAuaaadAuGfgcgaaucscsg | 2181 |
| AD-1397066 | gsasgaa(Ahd)guGfUfUfuuauauacgaL96 | 2164 | VPusdCsgudAudAuaaadAcAfcuuucucsusu | 2180 |
| AD-1397067 | gsusguu(Uhd)uaUfAfUfacgguacuuaL96 | 2165 | VPusdAsagdTadCcguadTaUfaaaacacsusu | 2183 |

TABLE 16
Exemplary dsRNA Molecules

| | | SEQ | | SEQ |
|---|---|---|---|---|
| | | ID | | ID |
| Duplex ID | Sense sequence (5′→3′)) | NO | Antisense sequence (5′→3′) | NO: |
| AD-1397070.1 | ascsgug(Ahd)ccCfAfAfgcucgcaugaL96 | 2185 | VPusdCsaudGcdGagcudTgGfgucacgusgsa | 2290 |
| AD-1397073.1 | usgsacc(Chd)aaGfCfUfcgcauggucaL96 | 2186 | VPusdGsacdCadTgcgadGcUfugggucascsg | 2291 |
| AD-1397075.1 | ascscca(Ahd)gcUfCfGfcauggucagaL96 | 2187 | VPusdCsugdAcdCaugcdGaGfcuuggguscsa | 2292 |
| AD-1397090.1 | usgsgca(Ghd)caAfCfAfaaggauuugaL96 | 2188 | VPusdCsaadAudCcuuudGuUfgcugccascsu | 2293 |
| AD-1397091.1 | gsgscag(Chd)aaCfAfAfaggauuugaaL96 | 2189 | VPusdTscadAadTccuudTgUfugcugccsasc | 2294 |
| AD-1397094.1 | asascaa(Ahd)ggAfUfUfugaaacuugaL96 | 2190 | VPusdCsaadGudTucaadAuCfcuuuguusgsc | 2295 |
| AD-1397095.1 | ascsaaa(Ghd)gaUfUfUfgaaacuuggaL96 | 2191 | VPusdCscadAgdTuucadAaUfccuuugususg | 2296 |
| AD-1397096.1 | csasaag(Ghd)auUfUfGfaaacuugguaL96 | 2192 | VPusdAsccdAadGuuucdAaAfuccuuugsus | 2297 |
| | | | u | |
| AD-1397097.1 | asasagg(Ahd)uuUfGfAfaacuuggugaL96 | 2193 | VPusdCsacdCadAguuudCaAfauccuuusgsu | 2298 |
| AD-1397098.1 | asasgga(Uhd)uuGfAfAfacuugguguaL96 | 2194 | VPusdAscadCcdAaguudTcAfaauccuususg | 2299 |
| AD-1397102.1 | asgsacg(Ahd)ugUfCfAfaccuuguguaL96 | 2195 | VPusdAscadCadAgguudGaCfaucgucusgsc | 2300 |
| AD-1397107.1 | usasggg(Chd)uaAfCfCfaguucucuuaL96 | 2196 | VPusdAsagdAgdAacugdGuUfagcccuasasa | 2301 |
| AD-1397108.1 | gsgsgcu(Ahd)acCfAfGfuucucuuugaL96 | 2197 | VPusdCsaadAgdAgaacdTgGfuuagcccsusa | 2302 |
| AD-1397109.1 | gsgscua(Ahd)ccAfGfUfucucuuuguaL96 | 2198 | VPusdAscadAadGagaadCuGfguuagccscsu | 2303 |
| AD-1397110.1 | asascca(Ghd)uuCfUfCfuuuguaaggaL96 | 2199 | VPusdCscudTadCaaagdAgAfacugguusasg | 2304 |
| AD-1397116.1 | csuscuu(Uhd)guAfAfGfgacuugugcaL96 | 2200 | VPusdGscadCadAguccdTuAfcaaagagsasa | 2305 |
| AD-1397118.1 | asusacu(Ghd)agGfGfUfgaaauuaagaL96 | 2201 | VPusdCsuudAadTuucadCcCfucaguausgsg | 2306 |
| AD-1397119.1 | ascsuga(Ghd)ggUfGfAfaauuaagggaL96 | 2202 | VPusdCsccdTudAauuudCaCfccucagusasu | 2307 |
| AD-1397120.1 | csusgag(Ghd)guGfAfAfauuaagggaaL96 | 2203 | VPusdTsccdCudTaauudTcAfcccucagsusa | 2308 |
| AD-1397126.1 | usasggu(Ghd)uuUfCfUfgccuuguugaL96 | 2204 | VPusdCsaadCadAggcadGaAfacaccuasgsg | 2309 |
| AD-1397127.1 | asgsgug(Uhd)uuCfUfGfccuuguugaaL96 | 2205 | VPusdTscadAcdAaggcdAgAfaacaccusasg | 2310 |
| AD-1397132.1 | asgscug(Ahd)acAfUfAfuacauagauaL96 | 2206 | VPusdAsucdTadTguaudAuGfuucagcusgsc | 2311 |
| AD-1397133.1 | gscsuga(Ahd)caUfAfUfacauagaugaL96 | 2207 | VPusdCsaudCudAuguadTaUfguucagcsusg | 2312 |
| AD-1397135.1 | gsasaca(Uhd)auAfCfAfuagauguugaL96 | 2208 | VPusdCsaadCadTcuaudGuAfuauguucsasg | 2313 |
| AD-1397138.1 | gsasguu(Ghd)uaGfUfUfggauuugucaL96 | 2209 | VPusdGsacdAadAuccadAcUfacaacucsasa | 2314 |
| AD-1397139.1 | asgsuug(Uhd)agUfUfGfgauuugucuaL96 | 2210 | VPusdAsgadCadAauccdAaCfuacaacuscsa | 2315 |
| AD-1397140.1 | gsusugu(Ahd)guUfGfGfauuugucugaL96 | 2211 | VPusdCsagdAcdAaaucdCaAfcuacaacsusc | 2316 |
| AD-1397144.1 | asgsuug(Ghd)auUfUfGfucuguuuauaL96 | 2212 | VPusdAsuadAadCagacdAaAfuccaacusasc | 2317 |
| AD-1397145.1 | ususgga(Uhd)uuGfUfCfuguuuaugcaL96 | 2213 | VPusdGscadTadAacagdAcAfaauccaascsu | 2318 |
| AD-1397150.1 | ususguc(Uhd)guUfUfAfugcuuggauaL96 | 2214 | VPusdAsucdCadAgcaudAaAfcagacaasasu | 2319 |
| AD-1397159.1 | cscsaga(Ghd)ugAfCfUfaugauagugaL96 | 2215 | VPusdCsacdTadTcauadGuCfacucuggsusg | 2320 |
| AD-1397160.1 | csasgag(Uhd)gaCfUfAfugauagugaaL96 | 2216 | VPusdCsaudGcdGagcudTgGfgucacgusgsa | 2290 |
| AD-1397163.1 | csgscau(Ghd)uaUfCfUfugaaaugcuaL96 | 2217 | VPusdGsacdCadTgcgadGcUfugggucascsg | 2291 |
| AD-1397165.1 | csasugu(Ahd)ucUfUfGfaaaugcuugaL96 | 2218 | VPusdCsugdAcdCaugcdGaGfcuuggguscsa | 2292 |
| AD-1397180.1 | gsgsuuu(Ghd)ggUfAfCfaguuaaaggaL96 | 2219 | VPusdCsaadAudCcuuudGuUfgcugccascsu | 2293 |
| AD-1397181.1 | ususugg(Ghd)uaCfAfGfuuaaaggcaaL96 | 2220 | VPusdTscadAadTccuudTgUfugcugccsasc | 2294 |
| AD-1397184.1 | csasuua(Chd)ugCfCfAfacaguuucgaL96 | 2221 | VPusdCsaadGudTucaadAuCfcuuuguusgsc | 2295 |
| AD-1397185.1 | usascug(Chd)caAfCfAfguuucggcuaL96 | 2222 | VPusdCscadAgdTuucadAaUfccuuugususg | 2296 |
| AD-1397186.1 | gsusucc(Uhd)cuUfCfCfugaaguucuaL96 | 2223 | VPusdAsccdAadGuuucdAaAfuccuuugsus | 2297 |
| | | | u | |
| AD-1397187.1 | ususccu(Chd)uuCfCfUfgaaguucuuaL96 | 2224 | VPusdCsacdCadAguuudCaAfauccuuusgsu | 2298 |
| AD-1397188.1 | uscscuc(Uhd)ucCfUfGfaaguucuugaL96 | 2225 | VPusdAscadCcdAaguudTcAfaauccuususg | 2299 |
| AD-1397191.1 | uscsuuc(Chd)ugAfAfGfuucuugugcaL96 | 2226 | VPusdAscadCadAgguudGaCfaucgucusgsc | 2300 |
| AD-1397196.1 | csascgc(Uhd)ggCfUfUfgugaucuuaaL96 | 2227 | VPusdAsagdAgdAacugdGuUfagcccuasasa | 2301 |
| AD-1397197.1 | usgsggc(Uhd)agAfUfAfggauauacuaL96 | 2228 | VPusdTscadCudAucaudAgUfcacucugsgsu | 2321 |
| AD-1397200.1 | usasgau(Ahd)ggAfUfAfuacuguaugaL96 | 2229 | VPusdAsgcdAudTucaadGaUfacaugcgsusc | 2322 |
| AD-1397205.1 | ascsuuu(Ahd)ucAfAfUfaguuccauuaL96 | 2230 | VPusdCsucdTudTacaadGcAfuuucaagsasu | 2323 |
| AD-1397206.1 | asusagu(Uhd)ccAfUfUfuaaauugacaL96 | 2231 | VPusdCscudCudTuacadAgCfauuucaasgsa | 2324 |
| AD-1397211.1 | asgsacu(Ghd)uaUfCfCfuguuugcuaaL96 | 2232 | VPusdAsgadAadCcucudTuAfcaagcaususu | 2325 |
| AD-1397212.1 | csusgua(Uhd)ccUfGfUfuugcuauugaL96 | 2233 | VPusdTsagdAadAccucdTuUfacaagcasusu | 2326 |
| AD-1397217.1 | asusgga(Chd)auCfUfGfguugcuuugaL96 | 2234 | VPusdCscudTudAacugdTaCfccaaaccsasg | 2327 |
| AD-1397219.1 | csusucu(Ghd)auUfUfCfucuucagcuaL96 | 2235 | VPusdTscudCudAaccadCcAfccaaaucsusa | 2328 |
| AD-1397221.1 | usgsauu(Uhd)cuCfUfUfcagcuuugaaL96 | 2236 | VPusdCsgadAadCuguudGgCfaguaaugsas | 2329 |
| | | | g | |
| AD-1397222.1 | gsasuuu(Chd)ucUfUfCfagcuuugaaaL96 | 2237 | VPusdAsgcdCgdAaacudGuUfggcaguasasu | 2330 |
| AD-1397224.1 | csusugc(Ahd)agUfCfCfcaugauuucaL96 | 2238 | VPusdAsagdAadCuucadGgAfagaggaascsc | 2331 |
| AD-1397225.1 | usgscaa(Ghd)ucCfCfAfugauuucuuaL96 | 2239 | VPusdCsaadGadAcuucdAgGfaagaggasasc | 2332 |
| AD-1397226.1 | csasagu(Chd)ccAfUfGfauuucuucgaL96 | 2240 | VPusdAscadAgdAacuudCaGfgaagaggsasa | 2333 |
| AD-1397227.1 | asgsucc(Chd)auGfAfUfuucuucgguaL96 | 2241 | VPusdCsacdAadGaacudTcAfggaagagsgsa | 2334 |
| AD-1397228.1 | gsusccc(Ahd)ugAfUfUfucuucgguaaL96 | 2242 | VPusdGscadCadAgaacdTuCfaggaagasgsg | 2335 |
| AD-1397230.1 | cscscau(Ghd)auUfUfCfuucgguaauaL96 | 2243 | VPusdCsuadAadCcaugdAuCfuuaggcusgsg | 2336 |
| AD-1397231.1 | cscsaug(Ahd)uuUfCfUfucgguaauuaL96 | 2244 | VPusdCscudAadAccaudGaUfcuuaggcsusg | 2337 |
| AD-1397232.1 | asgsgga(Chd)auGfAfAfaucaucuuaaL96 | 2245 | VPusdAsaudTudAucugdCcAfgcacugasusc | 2338 |
| AD-1397234.1 | gsgsaca(Uhd)gaAfAfUfcaucuuagcaL96 | 2246 | VPusdAsgudAudAuccudAuCfuagcccascsc | 2339 |
| AD-1397235.1 | gsascau(Ghd)aaAfUfCfaucuuagcuaL96 | 2247 | VPusdCsagdTadTauccdTaUfcuagcccsasc | 2340 |
| AD-1397237.1 | asusgaa(Ahd)ucAfUfCfuuagcuuagaL96 | 2248 | VPusdCsaudAcdAguaudAuCfcuaucuasgsc | 2341 |
| AD-1397238.1 | gsasaau(Chd)auCfUfUfagcuuagcuaL96 | 2249 | VPusdGsaadCudAuugadTaAfagugaguscsa | 2342 |
| AD-1397243.1 | gsuscua(Uhd)auAfGfUfguauuguguaL96 | 2250 | VPusdGsucdAadTuuaadAuGfgaacuausus | 2343 |
| | | | g | |
| AD-1397245.1 | usasuau(Ahd)guGfUfAfuuguguguuaL96 | 2251 | VPusdCsaadAcdAggaudAcAfgucucacscsa | 2344 |
| AD-1397246.1 | asusaua(Ghd)ugUfAfUfuguguguuuaL96 | 2252 | VPusdGscadAadCaggadTaCfagucucascsc | 2345 |
| AD-1397247.1 | csasaau(Ghd)auUfUfAfcacugacugaL96 | 2253 | VPusdAsgcdAadAcaggdAuAfcagucucsasc | 2346 |
| AD-1397248.1 | asasuga(Uhd)uuAfCfAfcugacuguuaL96 | 2254 | VPusdTsagdCadAacagdGaUfacagucuscsa | 2347 |
| AD-1397249.1 | gsasaau(Ahd)aaGfUfUfauuacucugaL96 | 2255 | VPusdCsaadTadGcaaadCaGfgauacagsusc | 2348 |
| AD-1397070.2 | ascsgug(Ahd)ccCfAfAfgcucgcaugaL96 | 2185 | VPusdCsaudGcdGagcudTgGfgucacgusgsa | 2290 |
| AD-1397073.2 | usgsacc(Chd)aaGfCfUfcgcauggucaL96 | 2186 | VPusdGsacdCadTgcgadGcUfugggucascsg | 2291 |
| AD-1397075.2 | ascscca(Ahd)gcUfCfGfcauggucagaL96 | 2187 | VPusdCsugdAcdCaugcdGaGfcuuggguscsa | 2292 |
| AD-1397252.1 | gscsucg(Chd)auGfGfUfcaguaaaagaL96 | 2256 | VPusdCsuudTudAcugadCcAfugcgagcsusu | 2349 |
| AD-1397253.1 | csuscgc(Ahd)ugGfUfCfaguaaaagcaL96 | 2257 | VPusdGscudTudTacugdAcCfaugcgagscsu | 2350 |
| AD-1397261.1 | gsuscag(Uhd)aaAfAfGfcaaagacggaL96 | 2258 | VPusdCscgdTcdTuugcdTuUfuacugacscsa | 2351 |
| AD-1397262.1 | uscsagu(Ahd)aaAfGfCfaaagacgggaL96 | 2259 | VPusdCsccdGudCuuugdCuUfuuacugascsc | 2352 |
| AD-1397263.1 | csasgua(Ahd)aaGfCfAfaagacgggaaL96 | 2260 | VPusdTsccdCgdTcuuudGcUfuuuacugsasc | 2353 |
| AD-1397266.1 | asusaau(Ahd)ucAfAfAfcacgucccgaL96 | 2261 | VPusdCsggdGadCgugudTuGfauauuauscs | 2354 |
| | | | c | |
| AD-1397268.1 | asasuau(Chd)aaAfCfAfcgucccgggaL96 | 2262 | VPusdCsccdGgdGacgudGuUfugauauusas | 2355 |
| | | | u | |
| AD-1397270.1 | usasuca(Ahd)acAfCfGfucccgggagaL96 | 2263 | VPusdCsucdCcdGggacdGuGfuuugauasus | 2356 |
| | | | u | |
| AD-1397271.1 | asuscaa(Ahd)caCfGfUfcccgggaggaL96 | 2264 | VPusdCscudCcdCgggadCgUfguuugausasu | 2357 |
| AD-1397277.1 | csascgu(Chd)ccGfGfGfaggcggcagaL96 | 2265 | VPusdCsugdCcdGccucdCcGfggacgugsusu | 2358 |
| AD-1397281.1 | uscsccg(Ghd)gaGfGfCfggcagugugaL96 | 2266 | VPusdCsacdAcdTgccgdCcUfcccgggascsg | 2359 |
| AD-1397291.1 | gscsaaa(Uhd)agUfCfUfacaaaccagaL96 | 2267 | VPusdCsugdGudTuguadGaCfuauuugcsas | 2360 |
| | | | c | |
| AD-1397294.1 | asasuag(Uhd)cuAfCfAfaaccaguugaL96 | 2268 | VPusdCsaadCudGguuudGuAfgacuauusus | 2361 |
| | | | g | |
| AD-1397295.1 | usasguc(Uhd)acAfAfAfccaguugacaL96 | 2269 | VPusdGsucdAadCuggudTuGfuagacuasus | 2362 |
| | | | u | |
| AD-1397303.1 | csasaca(Uhd)ccAfUfCfauaaaccagaL96 | 2270 | VPusdCsugdGudTuaugdAuGfgauguugscs | 2363 |
| | | | c | |
| AD-1397306.1 | asuscca(Uhd)caUfAfAfaccaggaggaL96 | 2271 | VPusdCscudCcdTgguudTaUfgauggausgsu | 2364 |
| AD-1397308.1 | cscsauc(Ahd)uaAfAfCfcaggaggugaL96 | 2272 | VPusdCsacdCudCcuggdTuUfaugauggsasu | 2365 |
| AD-1397309.1 | csasuca(Uhd)aaAfCfCfaggagguggaL96 | 2273 | VPusdCscadCcdTccugdGuUfuaugaugsgsa | 2366 |
| AD-1397317.1 | ascscag(Ghd)agGfUfGfgccagguggaL96 | 2274 | VPusdCscadCcdTggccdAcCfuccuggususu | 2367 |
| AD-1423244.1 | asgsaua(Ahd)uuAfAfUfaagaagcugaL96 | 2275 | VPusdCsagdCudTcuuadTuAfauuaucusgsc | 2368 |
| AD-1423250.1 | ususaau(Ahd)agAfAfGfcuggaucuuaL96 | 2276 | VPusdAsagdAudCcagcdTuCfuuauuaasusu | 2369 |
| AD-1423253.1 | asusaag(Ahd)agCfUfGfgaucuuagcaL96 | 2277 | VPusdGscudAadGauccdAgCfuucuuausus | 2370 |
| | | | a | |
| AD-1423259.1 | asgscug(Ghd)auCfUfUfagcaacgucaL96 | 2278 | PusdGsacdGudTgcuadAgAfuccagcususc | 2371 |
| AD-1423260.1 | gscsugg(Ahd)ucUfUfAfgcaacguccaL96 | 2279 | VPusdGsgadCgdTugcudAaGfauccagcsusu | 2372 |
| AD-1423262.1 | usgsgau(Chd)uuAfGfCfaacguccagaL96 | 2280 | VPusdCsugdGadCguugdCuAfagauccasgsc | 2373 |
| AD-1423271.1 | gscsaac(Ghd)ucCfAfGfuccaaguguaL96 | 2281 | VPusdAscadCudTggacdTgGfacguugcsusa | 2374 |
| AD-1423272.1 | csasacg(Uhd)ccAfGfUfccaagugugaL96 | 2282 | VPusdCsacdAcdTuggadCuGfgacguugscsu | 2375 |
| AD-1423273.1 | asascgu(Chd)caGfUfCfcaaguguggaL96 | 2283 | VPusdCscadCadCuuggdAcUfggacguusgsc | 2376 |
| AD-1423281.1 | gsuscca(Ahd)guGfUfGfgcucaaaggaL96 | 2284 | VPusdCscudTudGagccdAcAfcuuggacsusg | 2377 |
| AD-1423282.1 | uscscaa(Ghd)ugUfGfGfcucaaaggaaL96 | 2285 | VPusdTsccdTudTgagcdCaCfacuuggascsu | 2378 |
| AD-1423283.1 | cscsaag(Uhd)guGfGfCfucaaaggauaL96 | 2286 | VPusdAsucdCudTugagdCcAfcacuuggsasc | 2379 |
| AD-1423289.1 | gsusggc(Uhd)caAfAfGfgauaauaucaL96 | 2287 | VPusdGsaudAudTauccdTuUfgagccacsasc | 2380 |
| AD-1423291.1 | gsgscuc(Ahd)aaGfGfAfuaauaucaaaL96 | 2288 | VPusdTsugdAudAuuaudCcUfuugagccsasc | 2381 |
| AD-1423299.1 | gsgsaua(Ahd)uaUfCfAfaacacguccaL96 | 2289 | VPusdGsgadCgdTguuudGaUfauuauccsus | 2382 |
| | | | u | |
| AD-1397266.2 | asusaau(Ahd)ucAfAfAfcacgucccgaL96 | 2261 | VPusdCsggdGadCgugudTuGfauauuauscs | 2354 |
| | | | c | |
| AD-1397268.2 | asasuau(Chd)aaAfCfAfcgucccgggaL96 | 2262 | VPusdCsccdGgdGacgudGuUfugauauusas | 2355 |
| | | | u | |
| AD-1397270.2 | usasuca(Ahd)acAfCfGfucccgggagaL96 | 2263 | VPusdCsucdCcdGggacdGuGfuuugauasus | 2356 |
| | | | u | |
| AD-1397271.2 | asuscaa(Ahd)caCfGfUfcccgggaggaL96 | 2264 | VPusdCscudCcdCgggadCgUfguuugausasu | 2357 |
| AD-1397277.2 | csascgu(Chd)ccGfGfGfaggcggcagaL96 | 2265 | VPusdCsugdCcdGccucdCcGfggacgugsusu | 2358 |
| AD-1397294.2 | asasuag(Uhd)cuAfCfAfaaccaguugaL96 | 2268 | VPusdCsaadCudGguuudGuAfgacuauusus | 2361 |
| | | | g | |
| AD-1397306.2 | asuscca(Uhd)caUfAfAfaccaggaggaL96 | 2271 | VPusdCscudCcdTgguudTaUfgauggausgsu | 2364 |
| AD-1397308.2 | cscsauc(Ahd)uaAfAfCfcaggaggugaL96 | 2272 | VPusdCsacdCudCcuggdTuUfaugauggsasu | 2365 |
| AD-1397073.3 | usgsacc(Chd)aaGfCfUfcgcauggucaL96 | 2186 | VPusdGsacdCadTgcgadGcUfugggucascsg | 2291 |
| AD-1397252.2 | gscsucg(Chd)auGfGfUfcaguaaaagaL96 | 2256 | VPusdCsuudTudAcugadCcAfugcgagcsusu | 2349 |
| AD-1397263.2 | csasgua(Ahd)aaGfCfAfaagacgggaaL96 | 2260 | VPusdTsccdCgdTcuuudGcUfuuuacugsasc | 2353 |
| AD-1397309.2 | csasuca(Uhd)aaAfCfCfaggagguggaL96 | 2273 | VPusdCscadCcdTccugdGuUfuaugaugsgsa | 2366 |

TABLE 17
Exemplary dsRNA molecules

| | | SEQ | | SEQ |
|---|---|---|---|---|
| | | ID | | ID |
| Duplex ID | Sense sequence (5′→3′) | NO: | Antisense sequence (5′→3′) | NO: |
| AD-1251268.1 | csasuga(Uhd)cuUfCfUfuugucguagaL96 | 2383 | VPusdCsuadCgdAcaaadGadAgdAuc | 2470 |
| | | | augsusg | |
| AD-1251270.1 | csasuga(Uhd)cuUfCfUfuugucguagaL96 | 2383 | VPusdCsuadCgdAcaaadGadAgdAuc | 2471 |
| | | | augscsc | |
| AD-1251275.1 | csasuga(Uhd)cuUfCfUfuugucguagaL96 | 2383 | VPudCuadCgdAcaaadGadAgdAucau | 2472 |
| | | | gsusg | |
| AD-1251275.2 | csasuga(Uhd)cuUfCfUfuugucguagaL96 | 2383 | VPudCuadCgdAcaaadGadAgdAucau | 2472 |
| | | | gsusg | |
| AD-1251282.1 | usgsucgaguAfCfAfcuuu(Uhd)acugaL96 | 2384 | VPusdCsagdTadAaagudGudAcdTcga | 2473 |
| | | | casusu | |
| AD-1251357.1 | gsasgaa(Uhd)UfcaCfUfuuucuucguaL96 | 2385 | VPudAcgdAadGaaaadGudGadAuuc | 2474 |
| | | | ucscsu | |
| AD-1251385.1 | asusgau(Chd)UfuCfUfUfugucguaguaL96 | 2386 | VPudAcudAcdGacaadAgdAadGauca | 2475 |
| | | | usgsu | |
| AD-1251386.1 | usgsauc(Uhd)UfcUfUfUfgucguagugaL96 | 2387 | VPudCacdTadCgacadAadGadAgauc | 2476 |
| | | | asusg | |
| AD-1251459.1 | asusaua(Uhd)UfuUfaCfaacauccguaL96 | 2388 | VPudAcgdGadTguugdTadAadAuaua | 2477 |
| | | | uscsg | |
| AD-1331348 | asusgau(Chd)UfuCfUfUfugucguagsusa | 2389 | VPudAcudAcdGacaadAgdAadGauca | 2475 |
| | | | usgsu | |
| AD-1479607 | usgsauc(Uhd)UfcUfUfUfgucguagusgsa | 2390 | VPudCacdTadCgacadAadGadAgauc | 2476 |
| | | | asusg | |
| AD-1481956 | asusgau(Chd)UfuCfUfUfugucguagsusa | 2389 | VPusdAscudAcdGacaadAgdAadGau | 2478 |
| | | | causgsu | |
| AD-1481957 | usgsauc(Uhd)UfcUfUfUfgucguagusgsa | 2390 | VPusdCsacdTadCgacadAadGadAgau | 2479 |
| | | | casusg | |
| AD-1251472.1 | usasuuu(Uhd)acdAaCfauccguuauaL96 | 2391 | VPudAuadAcdGgaugdTudGudAaaa | 2480 |
| | | | uasusg | |
| AD-1251272.1 | usgsaucuUfCfUfuugu(Chd)guagaL96 | 2392 | VPusdCsuadCgdAcaaadGadAgdAuc | 2481 |
| | | | asusg | |
| AD-1251358.1 | cscsugaagcAfUfAfaaug(Uhd)uuucaL96 | 2393 | VPusdGsaadAadCauuudAudGcUfuc | 2482 |
| | | | aggsusu | |
| AD-1251378.1 | usasaaugUfuUfuCfgaaa(Uhd)ucacaL96 | 2394 | VPudGugdAadTuucgdAadAaCfauuu | 2483 |
| | | | asusg | |
| AD-1251405.1 | uscsuuugUfcgUfAfguga(Uhd)uuucaL96 | 2395 | VPudGaadAadTcacudAcdGaCfaaaga | 2484 |
| | | | sgsg | |
| AD-1251476.1 | ususua(Chd)aacaUfCfcguuauuacaL96 | 2396 | VPudGuadAudAacggdAudGuUfguaa | 2485 |
| | | | asgsu | |
| AD-1251266.1 | ususgauaguUfaCfcuag(Uhd)uugcaL96 | 2397 | VPudGcadAadCuaggdTadAcUfauca | 2486 |
| | | | asgsg | |
| AD-1251259.1 | ususgauaguUfaCfcuag(Uhd)uugcaL96 | 2397 | VPusdGscadAadCuaggdTadAcUfauc | 2487 |
| | | | aasgsg | |
| AD-1479603 | usasaaugUfuUfuCfgaaa(Uhd)ucascsa | 2398 | VPudGugdAadTuucgdAadAaCfauuu | 2483 |
| | | | asusg | |
| AD-1479612 | uscsuuugUfcgUfAfguga(Uhd)uuuscsa | 2399 | VPudGaadAadTcacudAcdGaCfaaaga | 2484 |
| | | | sgsg | |
| AD-1479603 | usasaaugUfuUfuCfgaaa(Uhd)ucascsa | 2398 | VPudGugdAadTuucgdAadAaCfauuu | 2483 |
| | | | asusg | |
| AD-1479612 | uscsuuugUfcgUfAfguga(Uhd)uuuscsa | 2399 | VPudGaadAadTcacudAcdGaCfaaaga | 2484 |
| | | | sgsg | |
| AD-1481954 | usasaaugUfuUfuCfgaaa(Uhd)ucascsa | 2398 | VPusdGsugdAadTuucgdAadAaCfau | 2488 |
| | | | uuasusg | |
| AD-1481961 | uscsuuugUfcgUfAfguga(Uhd)uuuscsa | 2399 | VPusdGsaadAadTcacudAcdGaCfaaa | 2489 |
| | | | gasgsg | |
| AD-1251262.1 | gsasuaguUfaCfcuag(Uhd)uugcaL96 | 2400 | VPusdGscadAadCuaggdTadAcUfauc | 2490 |
| | | | sgsg | |
| AD-1251279.2 | csasaca(Chd)aaUfUfUfcuucuuagcaL96 | 2401 | VPudGcudAadGaagadAaUfudGugu | 2491 |
| | | | ugsusu | |
| AD-1251278.1 | ascsacaaUfUfUfcuuc(Uhd)uagcaL96 | 2402 | VPusdGscudAadGaagadAaUfudGug | 2492 |
| | | | ususg | |
| AD-1251319.1 | asgsggaaaaCfadAucuu(Chd)cguuaL96 | 2403 | VPudAacdGgdAagaudTgUfuUfucccu | 2493 |
| | | | susu | |
| AD-1251348.1 | usgsuaggagdAaUfucau(Uhd)uuucaL96 | 2404 | VPusdGsaadAadAugaadTuCfuCfcua | 2494 |
| | | | cascsg | |
| AD-1251354.1 | asgsgagaauUfcdAcuuu(Uhd)cuucaL96 | 2405 | VPudGaadGadAaagudGaAfuUfcucc | 2495 |
| | | | usgsc | |
| AD-1251365.1 | asgsca(Uhd)aaaUfgUfuuucgaaauaL96 | 2406 | VPudAuudTcdGaaaadCaUfuUfaugc | 2496 |
| | | | ususc | |
| AD-1251419.1 | gsusaga(Uhd)CfuUfgCfaauuaccauaL96 | 2407 | VPudAugdGudAauugdCaAfgAfucua | 2497 |
| | | | csgsg | |
| AD-1251474.1 | asusuuuacadAcdAuccg(Uhd)uauuaL96 | 2408 | VPudAaudAadCggaudGuUfgUfaaaa | 2498 |
| | | | usgsu | |
| AD-1251419.2 | gsusaga(Uhd)CfuUfgCfaauuaccauaL96 | 2407 | VPudAugdGudAauugdCaAfgAfucua | 2497 |
| | | | csgsg | |
| AD-1479622 | gsusaga(Uhd)CfuUfgCfaauuaccasusa | 2409 | VPudAugdGudAauugdCaAfgAfucua | 2497 |
| | | | csgsg | |
| AD-1479593 | asgsca(Uhd)aaaUfgUfuuucgaaasusa | 2410 | VPudAuudTcdGaaaadCaUfuUfaugc | 2496 |
| | | | ususc | |
| AD-1479622 | gsusaga(Uhd)CfuUfgCfaauuaccasusa | 2409 | VPudAugdGudAauugdCaAfgAfucua | 2497 |
| | | | csgsg | |
| AD-1481938 | gsusaga(Uhd)CfuUfgCfaauuaccasusa | 2409 | VPusdAsugdGudAauugdCaAfgAfucu | 2499 |
| | | | acsgsg | |
| AD-1481952 | asgsca(Uhd)aaaUfgUfuuucgaaasusa | 2410 | VPusdAsuudTcdGaaaadCaUfuUfaug | 2500 |
| | | | cususc | |
| AD-1481938 | gsusaga(Uhd)CfuUfgCfaauuaccasusa | 2409 | VPusdAsugdGudAauugdCaAfgAfucu | 2499 |
| | | | acsgsg | |
| AD-1479586 | usgsuaggagdAaUfucau(Uhd)uuuscsa | 2411 | VPusdGsaadAadAugaadTuCfuCfcua | 2494 |
| | | | cascsg | |
| AD-1251304.1 | ascsaaagggAfAfAfacaa(Uhd)cuucaL96 | 2412 | VPudGaadGadTuguuuuCfcCfuuugus | 2501 |
| | | | gsu | |
| AD-1251305.1 | csasaagggaAfAfAfcaau(Chd)uuccaL96 | 2413 | VPudGgadAgdAuuguuuUfcCfcuuugs | 2502 |
| | | | usg | |
| AD-1251321.1 | gsgsaaaa(Chd)aaUfCfuuccguuucaL96 | 2414 | VPudGaadAcdGgaagauUfgUfuuuccs | 2503 |
| | | | csu | |
| AD-1251345.1 | usgsuaggAfgAfAfUfucau(Uhd)uuucaL96 | 2415 | VPusdGsaadAadAugaauuCfuCfcuac | 2504 |
| | | | ascsg | |
| AD-1251351.1 | gsusaggagaaUfUfcacu(Uhd)uucuaL96 | 2416 | VPudAgadAadAgugaauUfcUfccuacs | 2505 |
| | | | gsc | |
| AD-1251353.1 | usasggagaaUfUfCfacuu(Uhd)ucuuaL96 | 2417 | VPusdAsagdAadAagugaaUfuCfuccu | 2506 |
| | | | ascsg | |
| AD-1251381.1 | usasca(Uhd)gauCfUfUfcuuugucguaL96 | 2418 | VPudAscgdAcdAaagaagAfuCfaugua | 2507 |
| | | | scsc | |
| AD-1251265.1 | ususgauaguUfAfCfcuag(Uhd)uugcaL96 | 2419 | VPudGcadAadCuagguaAfcUfaucaas | 2508 |
| | | | gsg | |
| AD-1251257.1 | ususgau(Ahd)guUfAfCfcuaguuugcaL96 | 2420 | VPusdGscadAadCuagguaAfcUfauca | 2509 |
| | | | asgsg | |
| AD-1251264.1 | ususgauaguUfAfCfcuaa(Uhd)uugcaL96 | 2421 | VPusdGscadAadTuagguaAfcUfauca | 2510 |
| | | | asgsg | |
| AD-1251258.1 | ususgauaguUfAfCfcuag(Uhd)uugcaL96 | 2419 | VPusdGscadAadCuagguaAfcUfauca | 2509 |
| | | | asgsg | |
| AD-1251261.1 | gsasuaguUfAfCfcuag(Uhd)uugcaL96 | 2422 | VPusdGscadAadCuagguaAfcUfaucs | 2511 |
| | | | gsg | |
| AD-1479593 | asgsca(Uhd)aaaUfgUfuuucgaaasusa | 2410 | VPudAuudTcdGaaaadCaUfuUfaugc | 2496 |
| | | | ususc | |
| AD-1251283.1 | usgsucgaguAfCfAfcuuu(Uhd)acugaL96 | 2384 | VPusCfsagdTadAaagudGudAcdTcga | 2512 |
| | | | casusu | |
| AD-1251384.1 | csasuga(Uhd)CfuUfCfUfuugucguagaL96 | 2423 | VPuCfuadCgdAcaaadGadAgdAucau | 2513 |
| | | | gsusg | |
| AD-1251274.2 | csasuga(Uhd)cuUfCfUfuugucguagaL96 | 2383 | VPuCfuadCgdAcaaadGadAgdAucau | 2513 |
| | | | gsusg | |
| AD-1251269.1 | csasuga(Uhd)cuUfCfUfuugucguagaL96 | 2383 | VPusCfsuadCgdAcaaadGadAgdAuca | 2514 |
| | | | ugsusg | |
| AD-1251274.1 | csasuga(Uhd)cuUfCfUfuugucguagaL96 | 2383 | VPuCfuadCgdAcaaadGadAgdAucau | 2513 |
| | | | gsusg | |
| AD-1251271.1 | csasuga(Uhd)cuUfCfUfuugucguagaL96 | 2383 | VPusCfsuadCgdAcaaadGadAgdAuca | 2515 |
| | | | ugscsc | |
| AD-1251274.3 | csasuga(Uhd)cuUfCfUfuugucguagaL96 | 2383 | VPuCfuadCgdAcaaadGadAgdAucau | 2513 |
| | | | gsusg | |
| AD-1331354 | csasuga(Uhd)cuUfCfUfuugucguasgsa | 2424 | VPuCfuadCgdAcaaadGadAgdAucau | 2513 |
| | | | gsusg | |
| AD-1479606 | csasuga(Uhd)CfuUfCfUfuugucguasgsa | 2425 | VPuCfuadCgdAcaaadGadAgdAucau | 2513 |
| | | | gsusg | |
| AD-1331354 | csasuga(Uhd)cuUfCfUfuugucguasgsa | 2424 | VPuCfuadCgdAcaaadGadAgdAucau | 2513 |
| | | | gsusg | |
| AD-1479606 | csasuga(Uhd)CfuUfCfUfuugucguasgsa | 2425 | VPuCfuadCgdAcaaadGadAgdAucau | 2513 |
| | | | gsusg | |
| AD-1481942 | csasuga(Uhd)cuUfCfUfuugucguasgsa | 2424 | VPusCfsuadCgdAcaaadGadAgdAuca | 2514 |
| | | | ugsusg | |
| AD-1481955 | csasuga(Uhd)CfuUfCfUfuugucguasgsa | 2425 | VPusCfsuadCgdAcaaadGadAgdAuca | 2514 |
| | | | ugsusg | |
| AD-1251273.1 | usgsaucuUfCfUfuugu(Chd)guagaL96 | 2392 | VPusCfsuadCgdAcaaadGadAgdAuca | 2516 |
| | | | susg | |
| AD-1251320.1 | gsgsgaaaAfcAfaUfcuuc(Chd)guuuaL96 | 2426 | VPusAfsaadCgdGaagadTudGuUfuuc | 2517 |
| | | | ccsusu | |
| AD-1251325.1 | asasaacaauCfUfUfccgu(Uhd)ucaaaL96 | 2427 | VPuUfugdAadAcggadAgdAuUfguuu | 2518 |
| | | | uscsc | |
| AD-1251356.1 | gsgsagaaUfuCfaCfuuuu(Chd)uucgaL96 | 2428 | VPuCfgadAgdAaaagdTgdAaUfucucc | 2519 |
| | | | susg | |
| AD-1251418.1 | usgsuagaUfcUfudGcaau(Uhd)accaaL96 | 2429 | VPuUfggdTadAuugcdAadGaUfcuaca | 2520 |
| | | | sgsg | |
| AD-1251457.1 | gsasua(Uhd)aUfuUfudAcaacauccgaL96 | 2430 | VPuCfggdAudGuugudAadAaUfauau | 2521 |
| | | | csgsc | |
| AD-1251485.1 | csasagugUfuCfCfUfacug(Uhd)caugaL96 | 2431 | VPusCfsaudGadCaguadGgdAaCfacu | 2522 |
| | | | ugsgsg | |
| AD-1251325.1 | asasaacaauCfUfUfccgu(Uhd)ucaaaL96 | 2427 | VPuUfugdAadAcggadAgdAuUfguuu | 2518 |
| | | | uscsc | |
| AD-1331350 | asasaacaauCfUfUfccgu(Uhd)ucasasa | 2432 | VPuUfugdAadAcggadAgdAuUfguuu | 2518 |
| | | | uscsc | |
| AD-1331350 | asasaacaauCfUfUfccgu(Uhd)ucasasa | 2432 | VPuUfugdAadAcggadAgdAuUfguuu | 2518 |
| | | | uscsc | |
| AD-1479588 | gsgsagaaUfuCfaCfuuuu(Chd)uucsgsa | 2433 | VPuCfgadAgdAaaagdTgdAaUfucucc | 2519 |
| | | | susg | |
| AD-1481945 | asasaacaauCfUfUfccgu(Uhd)ucasasa | 2432 | VPusUfsugdAadAcggadAgdAuUfguu | 2523 |
| | | | uuscsc | |
| AD-1481948 | gsgsagaaUfuCfaCfuuuu(Chd)uucsgsa | 2433 | VPusCfsgadAgdAaaagdTgdAaUfucu | 2524 |
| | | | ccsusg | |
| AD-1251284.1 | usgsucgaguAfCfAfcuuu(Uhd)acugaL96 | 2384 | VPusCfsagdTadAaagudGuAfcdTcgac | 2525 |
| | | | asusu | |
| AD-1251286.1 | usgsucgaguAfCfAfcuuu(Uhd)acugaL96 | 2384 | VPusCfsagdTadAaagudGuAfcdTcgac | 2526 |
| | | | ascsc | |
| AD-1251288.1 | uscsgaguAfCfAfcuuu(Uhd)acugaL96 | 2434 | VPusCfsagdTadAaagudGuAfcdTcgas | 2527 |
| | | | csg | |
| AD-1251290.1 | usgsucgaguAfCfAfcuuu(Uhd)acugaL96 | 2384 | VPuCfagdTadAaagudGuAfcdTcgaca | 2528 |
| | | | susu | |
| AD-1251471.1 | asusauu(Uhd)UfaCfadAcauccguuaaL96 | 2435 | VPuUfaadCgdGaugudTgUfadAaaua | 2529 |
| | | | usgsu | |
| AD-1251475.1 | ususuua(Chd)aaCfaUfccguuauuaaL96 | 2436 | VPuUfaadTadAcggadTgUfudGuaaaa | 2530 |
| | | | susg | |
| AD-1251284.2 | usgsucgaguAfCfAfcuuu(Uhd)acugaL96 | 2384 | VPusCfsagdTadAaagudGuAfcdTcgac | 2525 |
| | | | asusu | |
| AD-1331352 | usgsucgaguAfCfAfcuuu(Uhd)acusgsa | 2437 | VPusCfsagdTadAaagudGuAfcdTcgac | 2525 |
| | | | asusu | |
| AD-1251322.1 | gsasaaa(Chd)aaUfCfUfuccauuucaaL96 | 2438 | VPuUfgadAadTggaagaUfudGuuuucs | 2531 |
| | | | csc | |
| AD-1479581 | gsasaaa(Chd)aaUfCfUfuccauuucsasa | 2439 | VPuUfgadAadTggaagaUfudGuuuucs | 2531 |
| | | | csc | |
| AD-1479581 | gsasaaa(Chd)aaUfCfUfuccauuucsasa | 2439 | VPuUfgadAadTggaagaUfudGuuuucs | 2531 |
| | | | csc | |
| AD-1481943 | gsasaaa(Chd)aaUfCfUfuccauuucsasa | 2439 | VPusUfsgadAadTggaagaUfudGuuuu | 2532 |
| | | | cscsc | |
| AD-1479588 | gsgsagaaUfuCfaCfuuuu(Chd)uucsgsa | 2433 | VPuCfgadAgdAaaagdTgdAaUfucucc | 2519 |
| | | | susg | |
| AD-1251303.1 | csascaaagggAfAfaacaa(Uhd)cuuaL96 | 2440 | VPusAfsagdAudTguuuucCfcUfuugu | 2533 |
| | | | gsusu | |
| AD-1251306.1 | asasagggAfaAfAfCfaauc(Uhd)uccgaL96 | 2441 | VPusCfsggdAadGauuguuUfuCfccuu | 2534 |
| | | | usgsu | |
| AD-1251307.1 | asasagggaadAaCfaauc(Uhd)uccgaL96 | 2442 | VPuCfggdAadGauugdTuUfuCfccuuu | 2535 |
| | | | sgsu | |
| AD-1251318.1 | asgsggaaAfaCfAfAfucuu(Chd)cguuaL96 | 2443 | VPusAfsacdGgdAagauugUfuUfuccc | 2536 |
| | | | ususu | |
| AD-1251324.1 | asasaacaAfuCfUfUfccgu(Uhd)ucaaaL96 | 2444 | VPusUfsugdAadAcggaagAfuUfguuu | 2537 |
| | | | uscsc | |
| AD-1251249.1 | usgsucgaguAfCfAfcuuu(Uhd)acugaL96 | 2384 | VPusCfsagdTadAaaguguAfcUfcgaca | 2538 |
| | | | susu | |
| AD-1251254.1 | usgsucgaguAfCfAfcuuu(Uhd)acugaL96 | 2384 | VPuCfagdTadAaaguguAfcUfcgacasc | 2539 |
| | | | sc | |
| AD-1251250.1 | usgsucgaguAfCfAfcuuu(Uhd)acugaL96 | 2384 | VPusCfsagdTadAaaguguAfcUfcgaca | 2540 |
| | | | scsc | |
| AD-1251251.1 | uscsgaguAfCfAfcuuu(Uhd)acugaL96 | 2434 | VPusCfsagdTadAaaguguAfcUfcgascs | 2541 |
| | | | g | |
| AD-1251350.1 | gsusaggagaAfUfUfcacu(Uhd)uucuaL96 | 2445 | VPusAfsgadAadAgugaauUfcUfccuac | 2542 |
| | | | sgsc | |
| AD-1251352.1 | usasggagAfaUfUfCfacuu(Uhd)ucuuaL96 | 2446 | VPusAfsagdAadAagugaaUfuCfuccua | 2543 |
| | | | scsg | |
| AD-1251355.1 | gsgsagaaUfuCfAfCfuuuu(Chd)uucgaL96 | 2447 | VPusCfsgadAgdAaaagugAfaUfucucc | 2544 |
| | | | susg | |
| AD-1251359.1 | csusgaagCfaUfAfAfaugu(Uhd)uucgaL96 | 2448 | VPusCfsgadAadAcauuuaUfgCfuucag | 2545 |
| | | | sgsu | |
| AD-1251363.1 | gsasagcauadAaUfguuu(Uhd)cgaaaL96 | 2449 | VPuUfucdGadAaacadTuUfaUfgcuuc | 2546 |
| | | | sasg | |
| AD-1251362.1 | gsasagcaUfaAfAfUfguuu(Uhd)cgaaaL96 | 2450 | VPusUfsucdGadAaacauuUfaUfgcuu | 2547 |
| | | | csasg | |
| AD-1251369.1 | asgscauaaaUfgUfuuu(Uhd)gaaauaL96 | 2451 | VPusAfsuudTcdAaaaadCaUfuUfaug | 2548 |
| | | | cususc | |
| AD-1251376.1 | asusaaa(Uhd)guUfUfUfcgaaauucaaL96 | 2452 | VPusUfsgadAudTucgaaaAfcAfuuuau | 2549 |
| | | | sgsc | |
| AD-1251377.1 | asusaaa(Uhd)guUfUfUfcgaaauucaaL96 | 2452 | VPusUfsgadAudTucgaaaAfcAfuuuau | 2550 |
| | | | sgsu | |
| AD-1251380.1 | usasca(Uhd)gAfuCfUfUfcuuugucguaL96 | 2453 | VPusAfscgdAcdAaagaagAfuCfaugua | 2551 |
| | | | sgsg | |
| AD-1251383.1 | csasuga(Uhd)CfuUfCfUfuugucguagaL96 | 2423 | VPusCfsuadCgdAcaaagaAfgAfucaug | 2552 |
| | | | susg | |
| AD-1251431.1 | usasugugAfaAfCfAfaacu(Uhd)uacgaL96 | 2454 | VPusCfsgudAadAguuuguUfuCfacau | 2553 |
| | | | asgsu | |
| AD-1251447.1 | gsusgaaaCfadAaCfcuua(Chd)gugaaL96 | 2455 | VPuUfcadCgdTaaggdTuUfgUfuucac | 2554 |
| | | | sgsu | |
| AD-1251446.1 | gsusgaaaCfaAfAfCfcuua(Chd)gugaaL96 | 2456 | VPusUfscadCgdTaagguuUfgUfuucac | 2555 |
| | | | sgsu | |
| AD-1251456.1 | gsasua(Uhd)aUfuUfUfAfcaacauccgaL96 | 2457 | VPusCfsggdAudGuuguaaAfaUfauau | 2556 |
| | | | csgsc | |
| AD-1251458.1 | asusaua(Uhd)UfuUfAfCfaacauccguaL96 | 2458 | VPusAfscgdGadTguuguaAfaAfuaua | 2557 |
| | | | uscsg | |
| AD-1251470.1 | asusauu(Uhd)UfaCfAfAfcauccguuaaL96 | 2459 | VPusUfsaadCgdGauguugUfaAfaaua | 2558 |
| | | | usgsu | |
| AD-1251473.1 | asusuuuaCfaAfCfAfuccg(Uhd)uauuaL96 | 2460 | VPusAfsaudAadCggauguUfgUfaaaa | 2559 |
| | | | usgsu | |
| AD-1251484.1 | csasagugUfuCfCfUfacug(Uhd)caugaL96 | 2431 | VPusCfsaudGadCaguaggAfaCfacuug | 2560 |
| | | | sgsg | |
| AD-1251249.1 | usgsucgaguAfCfAfcuuu(Uhd)acugaL96 | 2384 | VPusCfsagdTadAaaguguAfcUfcgaca | 2538 |
| | | | susu | |
| AD-1251318.1 | asgsggaaAfaCfAfAfucuu(Chd)cguuaL96 | 2443 | VPusAfsacdGgdAagauugUfuUfuccc | 2536 |
| | | | ususu | |
| AD-1251363.1 | gsasagcauadAaUfguuu(Uhd)cgaaaL96 | 2449 | VPuUfucdGadAaacadTuUfaUfgcuuc | 2546 |
| | | | sasg | |
| AD-1251377.2 | asusaaa(Uhd)guUfUfUfcgaaauucaaL96 | 2452 | VPusUfsgadAudTucgaaaAfcAfuuuau | 2550 |
| | | | sgsu | |
| AD-1331355 | usgsucgaguAfCfAfcuuu(Uhd)acusgsa | 2437 | VPusCfsagdTadAaaguguAfcUfcgaca | 2538 |
| | | | susu | |
| AD-1479582 | asasaacaAfuCfUfUfccgu(Uhd)ucasasa | 2461 | VPusUfsugdAadAcggaagAfuUfguuu | 2537 |
| | | | uscsc | |
| AD-1479587 | gsgsagaaUfuCfAfCfuuuu(Chd)uucsgsa | 2462 | VPusCfsgadAgdAaaagugAfaUfucucc | 2544 |
| | | | susg | |
| AD-1479589 | csusgaagCfaUfAfAfaugu(Uhd)uucsgsa | 2463 | VPusCfsgadAadAcauuuaUfgCfuucag | 2545 |
| | | | sgsu | |
| AD-1479591 | gsasagcaUfaAfAfUfguuu(Uhd)cgasasa | 2464 | VPusUfsucdGadAaacauuUfaUfgcuu | 2547 |
| | | | csasg | |
| AD-1479596 | asgscauaaaUfgUfuuu(Uhd)gaaasusa | 2465 | VPusAfsuudTcdAaaaadCaUfuUfaug | 2548 |
| | | | cususc | |
| AD-1479601 | asusaaa(Uhd)guUfUfUfcgaaauucsasa | 2466 | VPusUfsgadAudTucgaaaAfcAfuuuau | 2549 |
| | | | sgsc | |
| AD-1479602 | asusaaa(Uhd)guUfUfUfcgaaauucsasa | 2466 | VPusUfsgadAudTucgaaaAfcAfuuuau | 2550 |
| | | | sgsu | |
| AD-1479604 | usasca(Uhd)gAfuCfUfUfcuuugucgsusa | 2467 | VPusAfscgdAcdAaagaagAfuCfaugua | 2551 |
| | | | sgsg | |
| AD-1479605 | csasuga(Uhd)CfuUfCfUfuugucguasgsa | 2425 | VPusCfsuadCgdAcaaagaAfgAfucaug | 2552 |
| | | | susg | |
| AD-1331349 | gsasagcauadAaUfguuu(Uhd)cgasasa | 2468 | VPuUfucdGadAaacadTuUfaUfgcuuc | 2546 |
| | | | sasg | |
| AD-1481950 | gsasagcauadAaUfguuu(Uhd)cgasasa | 2468 | VPusUfsucdGadAaacadTuUfaUfgcu | 2561 |
| | | | ucsasg | |
| AD-1251251.1 | uscsgaguAfCfAfcuuu(Uhd)acugaL96 | 2434 | VPusCfsagdTadAaaguguAfcUfcgascs | 2541 |
| | | | g | |
| AD-1479580 | uscsgaguAfCfAfcuuu(Uhd)acusgsa | 2469 | VPusCfsagdTadAaaguguAfcUfcgascs | 2541 |
| | | | g | |
| AD-1331349 | gsasagcauadAaUfguuu(Uhd)cgasasa | 2468 | VPuUfucdGadAaacadTuUfaUfgcuuc | 2546 |
| | | | sasg | |

TABLE 18
Exemplary dsRNA molecules

| | | SEQ | | SEQ |
|---|---|---|---|---|
| | | ID | | ID |
| Duplex ID | Sense sequence (5′→3′) | NO: | Antisense sequence (5′→3′) | NO: |
| AD-1395794.1 | csuscuccaagUfAfUfgaucgucuuL96 | 2562 | asdAsgadCgdAucaudAcUfuggagagscsg | 2567 |
| AD-1395803.1 | csasgugaugCfUfCfuccaaguauuL96 | 2563 | asdAsuadCudTggagdAgCfaucacugsusg | 2568 |
| AD-1395805.1 | cscsaaguauGfAfUfcgucugcaguL96 | 2564 | asdCsugdCadGacgadTcAfuacuuggsasg | 2569 |
| AD-1395816.1 | gsgsguuuguUfudGUfuucauuucuL96 | 2565 | asdGsaadAudGaaacdAaAfcaaacccsusg | 2570 |
| AD-1395823.1 | gsasguauuuCfUfCfagcauucaauL96 | 2566 | asdTsugdAadTgcugdAgAfaauacucscsc | 2571 |

TABLE 19
Exemplary dsRNA molecules

| | | SEQ | | SEQ |
|---|---|---|---|---|
| | | ID | | ID |
| Duplex ID | Sense sequence (5′→3′) | NO: | Antisense sequence (5′→3′) | NO: |
| AD-1465901.1 | csasgcuaagGfCfAfguucuacguuL96 | 2572 | asdAscgdTadGaacudGcCfuuagcugsusg | 2690 |
| AD-1465906.1 | ususcuugggCfCfUfacuuuauauuL96 | 2573 | asdAsuadTadAaguadGgCfccaagaasgsu | 2691 |
| AD-1465907.1 | usascuuuauAfUfGfcugaagucguL96 | 2574 | asdCsgadCudTcagcdAuAfuaaaguasgsg | 2692 |
| AD-1465908.1 | ascsuuuauaUfGfCfugaagucgguL96 | 2575 | asdCscgdAcdTucagdCaUfauaaagusasg | 2693 |
| AD-1465909.1 | asgsuaaauuAfUfCfagaaggugcuL96 | 2576 | asdGscadCcdTucugdAuAfauuuacusgsu | 2694 |
| AD-1465911.1 | asuscagaagGfUfGfcuucuuaccuL96 | 2577 | asdGsgudAadGaagcdAcCfuucugausasa | 2695 |
| AD-1465912.1 | uscsagaaggUfGfCfuucuuaccuuL96 | 2578 | asdAsggdTadAgaagdCaCfcuucugasusa | 2696 |
| AD-1465913.1 | csasgaagguGfCfUfucuuaccuuuL96 | 2579 | asdAsagdGudAagaadGcAfccuucugsasu | 2697 |
| AD-1465915.1 | ascscuaugaAfUfGfgaguaucaguL96 | 2580 | asdCsugdAudAcuccdAuUfcauaggusgsu | 2698 |
| AD-1465916.1 | cscsuaugaaUfGfGfaguaucaguuL96 | 2581 | asdAscudGadTacucdCaUfucauaggsusg | 2699 |
| AD-1465917.1 | asusgaauggAfGfUfaucagugaguL96 | 2582 | asdCsucdAcdTgauadCuCfcauucausasg | 2700 |
| AD-1465918.1 | asusgccucaCfAfCfacaucuauuuL96 | 2583 | asdAsaudAgdAugugdTgUfgaggcausgsg | 2701 |
| AD-1465919.1 | usgsccucacAfCfAfcaucuauuauL96 | 2584 | asdTsaadTadGaugudGuGfugaggcasusg | 2702 |
| AD-1465920.1 | gscscucacaCfAfCfaucuauuacuL96 | 2585 | asdGsuadAudAgaugdTgUfgugaggcsasu | 2703 |
| AD-1465921.1 | cscsucacacAfCfAfucuauuacuuL96 | 2586 | asdAsgudAadTagaudGuGfugugaggscsa | 2704 |
| AD-1465922.1 | csuscacacaCfAfUfcuauuacucuL96 | 2587 | asdGsagdTadAuagadTgUfgugugagsgsc | 2705 |
| AD-1465927.1 | gsascguuugAfCfAfagcaaaucguL96 | 2588 | asdCsgadTudTgcuudGuCfaaacgucsusu | 2706 |
| AD-1465928.1 | gscscagucaUfCfAfucccuaauguL96 | 2589 | asdCsaudTadGggaudGaUfgacuggcsusc | 2707 |
| AD-1465932.1 | asasuguacaCfAfGfucaauggauuL96 | 2590 | asdAsucdCadTugacdTgUfguacauusasg | 2708 |
| AD-1465935.1 | gscscagauaUfAfAfcaguuuguguL96 | 2591 | asdCsacdAadAcugudTaUfaucuggcsasu | 2709 |
| AD-1465936.1 | cscsagauauAfAfCfaguuugugcuL96 | 2592 | asdGscadCadAacugdTuAfuaucuggscsa | 2710 |
| AD-1465937.1 | gsasgcagaaCfCfAfucauaagguuL96 | 2593 | asdAsccdTudAugaudGgUfucugcucscsa | 2711 |
| AD-1465942.1 | csasuccacuAfCfCfgcaaauauguL96 | 2594 | asdCsaudAudTugcgdGuAfguggaugsusa | 2712 |
| AD-1465945.1 | gscsugggauGfCfAfggcuuacauuL96 | 2595 | asdAsugdTadAgccudGcAfucccagcsusu | 2713 |
| AD-1465946.1 | csusgggaugCfAfGfgcuuacauuuL96 | 2596 | asdAsaudGudAagccdTgCfaucccagscsu | 2714 |
| AD-1465947.1 | usgsggaugcAfGfGfcuuacauuguL96 | 2597 | asdCsaadTgdTaagcdCuGfcaucccasgsc | 2715 |
| AD-1465949.1 | gsgsaugcagGfCfUfuacauugacuL96 | 2598 | asdGsucdAadTguaadGcCfugcauccscsa | 2716 |
| AD-1465951.1 | asusgcaggcUfUfAfcauugacauuL96 | 2599 | asdAsugdTcdAaugudAaGfccugcauscsc | 2717 |
| AD-1465955.1 | asgsgcuuacAfUfUfgacauuaaauL96 | 2600 | asdTsuudAadTgucadAuGfuaagccusgsc | 2718 |
| AD-1465956.1 | gsgscuuacaUfUfGfacauuaaaauL96 | 2601 | asdTsuudTadAugucdAaUfguaagccsusg | 2719 |
| AD-1465957.1 | gscsuuacauUfGfAfcauuaaaaauL96 | 2602 | asdTsuudTudAaugudCaAfuguaagcscsu | 2720 |
| AD-1465958.1 | csusuacauuGfAfCfauuaaaaacuL96 | 2603 | asdGsuudTudTaaugdTcAfauguaagscsc | 2721 |
| AD-1465959.1 | ususacauugAfCfAfuuaaaaacuuL96 | 2604 | asdAsgudTudTuaaudGuCfaauguaasgsc | 2722 |
| AD-1465960.1 | usascauugaCfAfUfuaaaaacuguL96 | 2605 | asdCsagdTudTuuaadTgUfcaauguasasg | 2723 |
| AD-1465961.1 | ascsauugacAfUfUfaaaaacugcuL96 | 2606 | asdGscadGudTuuuadAuGfucaaugusasa | 2724 |
| AD-1465968.1 | csasccuguaAfUfAfccagcgaauuL96 | 2607 | asdAsuudCgdCuggudAuUfacaggugscsa | 2725 |
| AD-1465969.1 | usgsuaauacCfAfGfcgaauaugguL96 | 2608 | asdCscadTadTucgcdTgGfuauuacasgsg | 2726 |
| AD-1465970.1 | gsusaauaccAfGfCfgaauauggauL96 | 2609 | asdTsccdAudAuucgdCuGfguauuacsasg | 2727 |
| AD-1465972.1 | gsusuauguaCfAfCfacaguacgauL96 | 2610 | asdTscgdTadCugugdTgUfacauaacsusu | 2728 |
| AD-1465973.1 | ususauguacAfCfAfcaguacgaauL96 | 2611 | asdTsucdGudAcugudGuGfuacauaascsu | 2729 |
| AD-1465976.1 | gsusacacacAfGfUfacgaagauguL96 | 2612 | asdCsaudCudTcguadCuGfuguguacsasu | 2730 |
| AD-1465986.1 | asasaccuauAfCfUfuauaagugguL96 | 2613 | asdCscadCudTauaadGuAfuagguuuscsc | 2731 |
| AD-1465992.1 | asusgaaucaAfAfCfaucaugagcuL96 | 2614 | asdGscudCadTgaugdTuUfgauucausasa | 2732 |
| AD-1465997.1 | cscsaguggcAfCfUfucuguaguguL96 | 2615 | asdCsacdTadCagaadGuGfccacuggsasc | 2733 |
| AD-1465998.1 | asgsuggcacUfUfCfuguaguguguL96 | 2616 | asdCsacdAcdTacagdAaGfugccacusgsg | 2734 |
| AD-1465999.1 | csusgggcacUfCfAfuucaucuauuL96 | 2617 | asdAsuadGadTgaaudGaGfugcccagsusg | 2735 |
| AD-1466002.1 | ususaacuucCfAfUfgaauucuaguL96 | 2618 | asdCsuadGadAuucadTgGfaaguuaascsa | 2736 |
| AD-1466004.1 | usgsaugaagAfCfUfcauaugagauL96 | 2619 | asdTscudCadTaugadGuCfuucaucasusc | 2737 |
| AD-1466005.1 | asasacucauCfAfUfugaaucagguL96 | 2620 | asdCscudGadTucaadTgAfugaguuuscsg | 2738 |
| AD-1466006.1 | asasacacagAfUfAfuaauuguuguL96 | 2621 | asdCsaadCadAuuaudAuCfuguguuusgsa | 2739 |
| AD-1466007.1 | csascagauaUfAfAfuuguugguuuL96 | 2622 | asdAsacdCadAcaaudTaUfaucugugsusu | 2740 |
| AD-1466009.1 | asusucugaaGfAfCfccuauagaguL96 | 2623 | asdCsucdTadTagggdTcUfucagaausasu | 2741 |
| AD-1466010.1 | csgsucuacuUfUfCfacuuggugcuL96 | 2624 | asdGscadCcdAagugdAaAfguagacgsusa | 2742 |
| AD-1466012.1 | asasuuacuaGfCfAfcauaaaguuuL96 | 2625 | asdAsacdTudTaugudGcUfaguaauususc | 2743 |
| AD-1466013.1 | usascuagcaCfAfUfaaaguuggguL96 | 2626 | asdCsccdAadCuuuadTgUfgcuaguasasu | 2744 |
| AD-1466014.1 | gsasgauggcAfUfUfuggcuucuguL96 | 2627 | asdCsagdAadGccaadAuGfccaucucscsc | 2745 |
| AD-1466019.1 | asasguuuccUfAfGfaguuagacauL96 | 2628 | asdTsgudCudAacucdTaGfgaaacuususg | 2746 |
| AD-1466020.1 | cscsuagaguUfAfGfacauaaaucuL96 | 2629 | asdGsaudTudAugucdTaAfcucuaggsasa | 2747 |
| AD-1466021.1 | usascaaguaAfGfAfcaggauggauL96 | 2630 | asdTsccdAudCcugudCuUfacuuguasgsa | 2748 |
| AD-1466024.1 | asgsgaccuuUfCfAfcccucuaaguL96 | 2631 | asdCsuudAgdAgggudGaAfagguccuscsg | 2749 |
| AD-1466026.1 | usgscuucauAfAfAfuccaaugaauL96 | 2632 | asdTsucdAudTggaudTuAfugaagcascsc | 2750 |
| AD-1466027.1 | cscsaaugaaAfCfAfucucuucccuL96 | 2633 | asdGsggdAadGagaudGuUfucauuggsasu | 2751 |
| AD-1466034.1 | gsasccgaagUfCfAfcaaguccuuuL96 | 2634 | asdAsagdGadCuugudGaCfuucggucsasu | 2752 |
| AD-1466039.1 | ususcuacccUfUfCfugaaucuaguL96 | 2635 | asdCsuadGadTucagdAaGfgguagaasusa | 2753 |
| AD-1466040.1 | csasucuccuAfCfUfcucaaugauuL96 | 2636 | asdAsucdAudTgagadGuAfggagaugsasa | 2754 |
| AD-1466043.1 | ususuaauccAfCfUfgguuauaguuL96 | 2637 | asdAscudAudAaccadGuGfgauuaaasusu | 2755 |
| AD-1466044.1 | ususaauccaCfUfGfguuauaguguL96 | 2638 | asdCsacdTadTaaccdAgUfggauuaasasu | 2756 |
| AD-1466046.1 | asusgguacaGfAfUfuacauugaguL96 | 2639 | asdCsucdAadTguaadTcUfguaccauscsu | 2757 |
| AD-1466047.1 | ascsugauguUfAfGfgacaaacauuL96 | 2640 | asdAsugdTudTguccdTaAfcaucagususu | 2758 |
| AD-1466050.1 | usgsaagacuCfUfGfaugauauucuL96 | 2641 | asdGsaadTadTcaucdAgAfgucuucasasu | 2759 |
| AD-1466051.1 | gsusaugaagAfGfCfaucucggaauL96 | 2642 | asdTsucdCgdAgaugdCuCfuucauacsusc | 2760 |
| AD-1466052.1 | asgsagcaucUfCfGfgaauucuuguL96 | 2643 | asdCsaadGadAuuccdGaGfaugcucususc | 2761 |
| AD-1466055.1 | asasuucuugGfUfCfcuauuaucauL96 | 2644 | asdTsgadTadAuaggdAcCfaagaauuscsc | 2762 |
| AD-1466058.1 | usgsaaguggAfUfGfauguuauccuL96 | 2645 | asdGsgadTadAcaucdAuCfcacuucasgsc | 2763 |
| AD-1466059.1 | gsasaguggaUfGfAfuguuauccauL96 | 2646 | asdTsggdAudAacaudCaUfccacuucsasg | 2764 |
| AD-1466060.1 | asuscagaggGfAfAfagacuuauguL96 | 2647 | asdCsaudAadGucuudTcCfcucugausgsa | 2765 |
| AD-1466062.1 | asgsccaaauAfGfCfaguuauaccuL96 | 2648 | asdGsgudAudAacugdCuAfuuuggcusgsa | 2766 |
| AD-1466063.1 | asgscaguuaUfAfCfcuacguauguL96 | 2649 | asdCsaudAcdGuaggdTaUfaacugcusasu | 2767 |
| AD-1466070.1 | gsasgagaauUfUfGfucuuacuauuL96 | 2650 | asdAsuadGudAagacdAaAfuucucucsasu | 2768 |
| AD-1466081.1 | gsasaaagaaGfAfGfcugguacuauL96 | 2651 | asdTsagdTadCcagcdTcUfucuuuucsasu | 2769 |
| AD-1466083.1 | asasagaagaGfCfUfgguacuauguL96 | 2652 | asdCsaudAgdTaccadGcUfcuucuuususc | 2770 |
| AD-1466085.1 | asgsaagagcUfGfGfuacuaugaauL96 | 2653 | asdTsucdAudAguacdCaGfcucuucususu | 2771 |
| AD-1466089.1 | gsasgcugguAfCfUfaugaaaagauL96 | 2654 | asdTscudTudTcauadGuAfccagcucsusu | 2772 |
| AD-1466091.1 | gscsugguacUfAfUfgaaaagaaguL96 | 2655 | asdCsuudCudTuucadTaGfuaccagcsusc | 2773 |
| AD-1466095.1 | ususucacgcCfAfUfuaaugggauuL96 | 2656 | asdAsucdCcdAuuaadTgGfcgugaaascsu | 2774 |
| AD-1466096.1 | asusuaauggGfAfUfgaucuacaguL96 | 2657 | asdCsugdTadGaucadTcCfcauuaausgsg | 2775 |
| AD-1466097.1 | gscsucccaaGfAfCfauucacguguL96 | 2658 | asdCsacdGudGaaugdTcUfugggagcscsg | 2776 |
| AD-1466100.1 | asusgcaaacGfCfCfauuucuuauuL96 | 2659 | asdAsuadAgdAaaugdGcGfuuugcauscsc | 2777 |
| AD-1466101.1 | gscsaaacgcCfAfUfuucuuaucauL96 | 2660 | asdTsgadTadAgaaadTgGfcguuugcsasu | 2778 |
| AD-1466104.1 | usasagcacuGfGfUfaucauaucuuL96 | 2661 | asdAsgadTadTgauadCcAfgugcuuasgsu | 2779 |
| AD-1466108.1 | asasacaaugGfUfGfgaucuuauauL96 | 2662 | asdTsaudAadGauccdAcCfauuguuusasa | 2780 |
| AD-1466109.1 | csasauggugGfAfUfcuuauaauguL96 | 2663 | asdCsaudTadTaagadTcCfaccauugsusu | 2781 |
| AD-1466110.1 | gsgsuggaucUfUfAfuaaugcuuguL96 | 2664 | asdCsaadGcdAuuaudAaGfauccaccsasu | 2782 |
| AD-1466111.1 | asuscuuauaAfUfGfcuuggaguguL96 | 2665 | asdCsacdTcdCaagcdAuUfauaagauscsc | 2783 |
| AD-1466115.1 | usasuaccacAfGfAfguucuauguuL96 | 2666 | asdAscadTadGaacudCuGfugguauasgsc | 2784 |
| AD-1466116.1 | usasccacagAfGfUfucuauguaguL96 | 2667 | asdCsuadCadTagaadCuCfugugguasusa | 2785 |
| AD-1466118.1 | csascagaguUfCfUfauguagcuuuL96 | 2668 | asdAsagdCudAcauadGaAfcucugugsgsu | 2786 |
| AD-1466120.1 | asgsuucuauGfUfAfgcuuacaguuL96 | 2669 | asdAscudGudAagcudAcAfuagaacuscsu | 2787 |
| AD-1466126.1 | uscsaguuugAfCfCfcaccuauuguL96 | 2670 | asdCsaadTadGguggdGuCfaaacugasusu | 2788 |
| AD-1466127.1 | csasguuugaCfCfCfaccuauuguuL96 | 2671 | asdAscadAudAggugdGgUfcaaacugsasu | 2789 |
| AD-1466128.1 | csusauugugGfCfUfagauauauuuL96 | 2672 | asdAsaudAudAucuadGcCfacaauagsgsu | 2790 |
| AD-1466131.1 | asgscaaaucAfCfAfgcuucuucguL96 | 2673 | asdCsgadAgdAagcudGuGfauuugcususg | 2791 |
| AD-1466133.1 | asasauugauCfUfAfcucaagaucuL96 | 2674 | asdGsaudCudTgagudAgAfucaauuuscsu | 2792 |
| AD-1466139.1 | uscscaugguGfGfAfcaagauuuuuL96 | 2675 | asdAsaadAudCuugudCcAfccauggasgsg | 2793 |
| AD-1466140.1 | cscsauggugGfAfCfaagauuuuuuL96 | 2676 | asdAsaadAadTcuugdTcCfaccauggsasg | 2794 |
| AD-1466141.1 | csasugguggAfCfAfagauuuuuguL96 | 2677 | asdCsaadAadAucuudGuCfcaccaugsgsa | 2795 |
| AD-1466142.1 | asusgguggaCfAfAfgauuuuugauL96 | 2678 | asdTscadAadAaucudTgUfccaccausgsg | 2796 |
| AD-1466143.1 | usgsguggacAfAfGfauuuuugaauL96 | 2679 | asdTsucdAadAaaucdTuGfuccaccasusg | 2797 |
| AD-1466144.1 | gsgsuggacaAfGfAfuuuuugaaguL96 | 2680 | asdCsuudCadAaaaudCuUfguccaccsasu | 2798 |
| AD-1466145.1 | gsusggacaaGfAfUfuuuugaagguL96 | 2681 | asdCscudTcdAaaaadTcUfuguccacscsa | 2799 |
| AD-1466152.1 | asgsauuuuuGfAfAfggaaauacuuL96 | 2682 | asdAsgudAudTuccudTcAfaaaaucususg | 2800 |
| AD-1466153.1 | gsasuuuuugAfAfGfgaaauacuauL96 | 2683 | asdTsagdTadTuuccdTuCfaaaaaucsusu | 2801 |
| AD-1466157.1 | ususugaaggAfAfAfuacuaauacuL96 | 2684 | asdGsuadTudAguaudTuCfcuucaaasasa | 2802 |
| AD-1466158.1 | ususgaaggaAfAfUfacuaauaccuL96 | 2685 | asdGsgudAudTaguadTuUfccuucaasasa | 2803 |
| AD-1466160.1 | csusaauaccAfAfAfggacauguguL96 | 2686 | asdCsacdAudGuccudTuGfguauuagsusa | 2804 |
| AD-1466161.1 | usasauaccaAfAfGfgacaugugauL96 | 2687 | asdTscadCadTguccdTuUfgguauuasgsu | 2805 |
| AD-1466162.1 | csasaucauuUfCfCfagguuuaucuL96 | 2688 | asdGsaudAadAccugdGaAfaugauugsgsg | 2806 |
| AD-1466163.1 | asuscauuucCfAfGfguuuauccguL96 | 2689 | asdCsggdAudAaaccdTgGfaaaugaususg | 2807 |

TABLE 20
Exemplary dsRNA molecules

| | | SEQ | | SEQ |
|---|---|---|---|---|
| | | ID | | ID |
| Duplex ID | Sense sequence (5′→3′) | NO: | Antisense sequence (5′→3′) | NO: |
| AD-1395757.1 | csasggu(Chd)cuCfAfCfuuuaauccsusa | 2808 | VPusdAsggdAudTaaagdTgdAgdGaccugscsg | 2811 |
| AD-1395758.1 | csasggu(Chd)cuCfaCfUfuuaauccsusa | 2809 | VPusdAsggdAudTaaagdTgdAgdGaccugscsg | 2811 |
| AD-1395763.1 | csascuu(Uhd)aaUfCfCfucuauccasgsa | 2810 | VPusdCsugdGadTagagdGadTudAaagugsasg | 2812 |
| AD-1395756.1 | csasggu(Chd)cuCfAfCfuuuaauccsusa | 2808 | VPusdAsggdAudTaaagdTgAfggaccugscsg | 2813 |
| AD-1395762.1 | csascuu(Uhd)aaUfCfCfucuauccasgsa | 2810 | VPusdCsugdGadTagagdGaUfuaaagugsasg | 2814 |

TABLE 21
Exemplary dsRNA molecules

| | | SEQ | | SEQ |
|---|---|---|---|---|
| | | ID | | ID |
| Duplex ID | Sense sequence (5′→3′) | NO: | Antisense sequence (5′→3′) | NO: |
| AD-1331279.1 | asasuguucaCfAfAfuuaagcuccuL96 | 2815 | asdGsgadGcdTuaaudTgUfgaacauususu | 2839 |
| AD-1331280.1 | asusuugcuaUfGfUfuagacgauguL96 | 2816 | asdCsaudCgdTcuaadCaUfagcaaauscsu | 2840 |
| AD-1331281.1 | ususgcuaugUfUfAfgacgauguaaL96 | 2817 | usdTsacdAudCgucudAaCfauagcaasasu | 2841 |
| AD-1331282.1 | usgscuauguUfAfGfacgauguaaaL96 | 2818 | usdTsuadCadTcgucdTaAfcauagcasasa | 2842 |
| AD-1331283.1 | asascugagaAfGfAfacuacauauaL96 | 2819 | usdAsuadTgdTaguudCuUfcucaguuscsc | 2843 |
| AD-1331284.1 | asasccaacaGfCfAfuagucaaauaL96 | 2820 | usdAsuudTgdAcuaudGcUfguugguususa | 2844 |
| AD-1331285.1 | cscscacagaAfAfUfuucucuaucuL96 | 2821 | asdGsaudAgdAgaaadTuUfcugugggsusu | 2845 |
| AD-1331286.1 | csasgguaguCfCfAfuggacauuaaL96 | 2822 | usdTsaadTgdTccaudGgAfcuaccugsasu | 2846 |
| AD-1331287.1 | gsgsuaguccAfUfGfgacauuaauuL96 | 2823 | asdAsuudAadTguccdAuGfgacuaccsusg | 2847 |
| AD-1331288.1 | asgsuuggaaGfAfCfuggaaagacaL96 | 2824 | usdGsucdTudTccagdTcUfuccaacuscsa | 2848 |
| AD-1331289.1 | usgsgaaagaCfAfAfcaaacauuauL96 | 2825 | asdTsaadTgdTuugudTgUfcuuuccasgsu | 2849 |
| AD-1331290.1 | ususuacuugGfGfAfaaucacgaaaL96 | 2826 | usdTsucdGudGauuudCcCfaaguaaasasa | 2850 |
| AD-1331291.1 | gsgsgaaaucAfCfGfaaaccaacuaL96 | 2827 | usdAsgudTgdGuuucdGuGfauuucccsasa | 2851 |
| AD-1331292.1 | gsasaaucacGfAfAfaccaacuauaL96 | 2828 | usdAsuadGudTgguudTcGfugauuucscsc | 2852 |
| AD-1331293.1 | csgsaaaccaAfCfUfauacgcuacaL96 | 2829 | usdGsuadGcdGuauadGuUfgguuucgsusg | 2853 |
| AD-1331294.1 | asuscaaccaAfAfAfuguugauccaL96 | 2830 | usdGsgadTcdAacaudTuUfgguugaususu | 2854 |
| AD-1331295.1 | ususaaaacuCfUfAfaacuugacuaL96 | 2831 | usdAsgudCadAguuudTgAfguuuuaascsa | 2855 |
| AD-1331296.1 | csasaaacuuGfAfAfagccuccuauL96 | 2832 | asdTsagdGadGgcuudTcAfaguuuugsasg | 2856 |
| AD-1331297.1 | uscsaacaucGfAfAfuagauggauuL96 | 2833 | asdAsucdCadTcuaudTcGfauguugasasu | 2857 |
| AD-1331298.1 | csasaaacuuCfAfAfugaaacguguL96 | 2834 | asdCsacdGudTucaudTgAfaguuuugsusg | 2858 |
| AD-1331299.1 | asasucacgaAfAfCfcaacuauacuL96 | 2835 | asdGsuadTadGuuggdTuUfcgugauususc | 2859 |
| AD-1331300.1 | gsgsgaaucaAfUfUfuuagaugguuL96 | 2836 | asdAsccdAudCuaaadAuUfgauucccsasc | 2860 |
| AD-1331301.1 | csasaaauguUfGfAfuccauccaauL96 | 2837 | asdTsugdGadTggaudCaAfcauuuugsgsu | 2861 |
| AD-1331302.1 | usgsgacauuAfAfUfucaacaucgaL96 | 2838 | usdCsgadTgdTugaadTuAfauguccasusg | 2862 |
| AD-1331328.1 | asasuguucaCfAfAfuuaagcuccuL96 | 2815 | asdGsgadGcdTuaaudTgdTgdAacauususu | 2863 |
| AD-1331329.1 | asusuugcuaUfGfUfuagacgauguL96 | 2816 | asdCsaudCgdTcuaadCadTadGcaaauscsu | 2864 |
| AD-1331330.1 | ususgcuaugUfUfAfgacgauguaaL96 | 2817 | usdTsacdAudCgucudAadCadTagcaasasu | 2865 |
| AD-1331306.1 | usgscuauguUfAfGfacgauguaaaL96 | 2818 | usdTsuadCadTcgucdTadAcdAuagcasasa | 2866 |
| AD-1331331.1 | asascugagaAfGfAfacuacauauaL96 | 2819 | usdAsuadTgdTaguudCudTcdTcaguuscsc | 2867 |
| AD-1331332.1 | asasccaacaGfCfAfuagucaaauaL96 | 2820 | usdAsuudTgdAcuaudGcdTgdTugguususa | 2868 |
| AD-1331333.1 | cscscacagaAfAfUfuucucuaucuL96 | 2821 | asdGsaudAgdAgaaadTudTcdTgugggsusu | 2869 |
| AD-1331334.1 | csasgguaguCfCfAfuggacauuaaL96 | 2822 | usdTsaadTgdTccaudGgdAcdTaccugsasu | 2870 |
| AD-1331311.1 | gsgsuaguccAfUfGfgacauuaauuL96 | 2823 | asdAsuudAadTguccdAudGgdAcuaccsusg | 2871 |
| AD-1331335.1 | asgsuuggaaGfAfCfuggaaagacaL96 | 2824 | usdGsucdTudTccagdTcdTudCcaacuscsa | 2872 |
| AD-1331336.1 | usgsgaaagaCfAfAfcaaacauuauL96 | 2825 | asdTsaadTgdTuugudTgdTcdTuuccasgsu | 2873 |
| AD-1331314.1 | ususuacuugGfGfAfaaucacgaaaL96 | 2826 | usdTsucdGudGauuudCcdCadAguaaasasa | 2874 |
| AD-1331337.1 | gsgsgaaaucAfCfGfaaaccaacuaL96 | 2827 | usdAsgudTgdGuuucdGudGadTuucccsasa | 2875 |
| AD-1331316.1 | gsasaaucacGfAfAfaccaacuauaL96 | 2828 | usdAsuadGudTgguudTcdGudGauuucscsc | 2876 |
| AD-1331338.1 | csgsaaaccaAfCfUfauacgcuacaL96 | 2829 | usdGsuadGcdGuauadGudTgdGuuucgsusg | 2877 |
| AD-1331339.1 | asuscaaccaAfAfAfuguugauccaL96 | 2830 | usdGsgadTcdAacaudTudTgdGuugaususu | 2878 |
| AD-1331340.1 | ususaaaacuCfUfAfaacuugacuaL96 | 2831 | usdAsgudCadAguuudTgdAgdTuuuaascsa | 2879 |
| AD-1331320.1 | csasaaacuuGfAfAfagccuccuauL96 | 2832 | asdTsagdGadGgcuudTcdAadGuuuugsasg | 2880 |
| AD-1331341.1 | uscsaacaucGfAfAfuagauggauuL96 | 2833 | asdAsucdCadTcuaudTcdGadTguugasasu | 2881 |
| AD-1331322.1 | csasaaacuuCfAfAfugaaacguguL96 | 2834 | asdCsacdGudTucaudTgdAadGuuuugsusg | 2882 |
| AD-1331342.1 | asasucacgaAfAfCfcaacuauacuL96 | 2835 | asdGsuadTadGuuggdTudTcdGugauususc | 2883 |
| AD-1331343.1 | gsgsgaaucaAfUfUfuuagaugguuL96 | 2836 | asdAsccdAudCuaaadAudTgdAuucccsasc | 2884 |
| AD-1331325.1 | csasaaauguUfGfAfuccauccaauL96 | 2837 | asdTsugdGadTggaudCadAcdAuuuugsgsu | 2885 |
| AD-1331344.1 | usgsgacauuAfAfUfucaacaucgaL96 | 2838 | usdCsgadTgdTugaadTudAadTguccasusg | 2886 |

TABLE 22
Exemplary dsRNA molecules

| | | SEQ | | ISEQ |
|---|---|---|---|---|
| | | ID | | ID |
| Duplex ID | Sense sequence (5′→3′) | NO: | Antisense sequence (5′→3′) | NO: |
| AD-1554875 | gscscugugaGfGfAfcuccaagaguL96 | 2887 | asdCsucdTudGgagudCcUfcacaggcscsu | 3013 |
| AD-1554909 | gsgsugcuacUfCfUfgguauuuccuL96 | 2888 | asdGsgadAadTaccadGaGfuagcaccscsc | 3014 |
| AD-1554910 | gsusgcuacuCfUfGfguauuuccuuL96 | 2889 | asdAsggdAadAuaccdAgAfguagcacscsc | 3015 |
| AD-1554911 | usgscuacucUfGfGfuauuuccuauL96 | 2890 | asdTsagdGadAauacdCaGfaguagcascsc | 3016 |
| AD-1554912 | gscsuacucuGfGfUfauuuccuaguL96 | 2891 | asdCsuadGgdAaauadCcAfgaguagcsasc | 3017 |
| AD-1554913 | csusacucugGfUfAfuuuccuagguL96 | 2892 | asdCscudAgdGaaaudAcCfagaguagscsa | 3018 |
| AD-1554914 | usascucuggUfAfUfuuccuaggguL96 | 2893 | asdCsccdTadGgaaadTaCfcagaguasgsc | 3019 |
| AD-1554915 | ascsucugguAfUfUfuccuaggguuL96 | 2894 | asdAsccdCudAggaadAuAfccagagusasg | 3020 |
| AD-1554916 | csuscugguaUfUfUfccuaggguauL96 | 2895 | asdTsacdCcdTaggadAaUfaccagagsusa | 3021 |
| AD-1554917 | uscsugguauUfUfCfcuaggguacuL96 | 2896 | asdGsuadCcdCuaggdAaAfuaccagasgsu | 3022 |
| AD-1554923 | asusuuccuaGfGfGfuacaaggcguL96 | 2897 | asdCsgcdCudTguacdCcUfaggaaausasc | 3023 |
| AD-1554951 | gsgsucagccAfGfGfuguacucaguL96 | 2898 | asdCsugdAgdTacacdCuGfgcugaccsasu | 3024 |
| AD-1554955 | asgsccagguGfUfAfcucaggcaguL96 | 2899 | asdCsugdCcdTgagudAcAfccuggcusgsa | 3025 |
| AD-1554992 | gscscacuucUfCfCfcaggaucuuuL96 | 2900 | asdAsagdAudCcuggdGaGfaaguggcsgsa | 3026 |
| AD-1554997 | ususcucccaGfGfAfucuuacccguL96 | 2901 | asdCsggdGudAagaudCcUfgggagaasgsu | 3027 |
| AD-1555000 | uscsccaggaUfCfUfuacccgccguL96 | 2902 | asdCsggdCgdGguaadGaUfccugggasgsa | 3028 |
| AD-1555030 | gscscuuccgCfAfGfugaaaccgcuL96 | 2903 | asdGscgdGudTucacdTgCfggaaggcsasc | 3029 |
| AD-1555106 | csasacuccaGfCfUfccgucuauuuL96 | 2904 | asdAsaudAgdAcggadGcUfggaguugsusa | 3030 |
| AD-1555112 | csasgcuccgUfCfUfauuccuuuguL96 | 2905 | asdCsaadAgdGaauadGaCfggagcugsgsa | 3031 |
| AD-1555114 | csuscaccugCfUfUfcuucugguuuL96 | 2906 | asdAsacdCadGaagadAgCfaggugagsgsg | 3032 |
| AD-1555115 | uscsaccugcUfUfCfuucugguucuL96 | 2907 | asdGsaadCcdAgaagdAaGfcaggugasgsg | 3033 |
| AD-1555117 | ascscugcuuCfUfUfcugguucauuL96 | 2908 | asdAsugdAadCcagadAgAfagcaggusgsa | 3034 |
| AD-1555118 | cscsugcuucUfUfCfugguucauuuL96 | 2909 | asdAsaudGadAccagdAaGfaagcaggsusg | 3035 |
| AD-1555120 | usgscuucuuCfUfGfguucauucuuL96 | 2910 | asdAsgadAudGaaccdAgAfagaagcasgsg | 3036 |
| AD-1555121 | gscsuucuucUfGfGfuucauucucuL96 | 2911 | asdGsagdAadTgaacdCaGfaagaagcsasg | 3037 |
| AD-1555122 | csusucuucuGfGfUfucauucuccuL96 | 2912 | asdGsgadGadAugaadCcAfgaagaagscsa | 3038 |
| AD-1555123 | ususcuucugGfUfUfcauucuccauL96 | 2913 | asdTsggdAgdAaugadAcCfagaagaasgsc | 3039 |
| AD-1555128 | csusgguucaUfUfCfuccaaauccuL96 | 2914 | asdGsgadTudTggagdAaUfgaaccagsasa | 3040 |
| AD-1555184 | ascsagggccGfAfGfuacgaaguguL96 | 2915 | asdCsacdTudCguacdTcGfgcccugusasg | 3041 |
| AD-1555185 | csasgggccgAfGfUfacgaagugguL96 | 2916 | asdCscadCudTcguadCuCfggcccugsusa | 3042 |
| AD-1555212 | cscsagugugAfAfAfgacauagcuuL96 | 2917 | asdAsgcdTadTgucudTuCfacacuggscsu | 3043 |
| AD-1555213 | csasgugugaAfAfGfacauagcuguL96 | 2918 | asdCsagdCudAugucdTuUfcacacugsgsc | 3044 |
| AD-1555234 | asusugaauuCfCfAfcgcuggguuuL96 | 2919 | asdAsacdCcdAgcgudGgAfauucaausgsc | 3045 |
| AD-1555235 | ususgaauucCfAfCfgcuggguuguL96 | 2920 | asdCsaadCcdCagcgdTgGfaauucaasusg | 3046 |
| AD-1555236 | usgsaauuccAfCfGfcuggguuguuL96 | 2921 | asdAscadAcdCcagcdGuGfgaauucasasu | 3047 |
| AD-1555238 | asasuuccacGfCfUfggguuguuauL96 | 2922 | asdTsaadCadAcccadGcGfuggaauuscsa | 3048 |
| AD-1555241 | uscscacgcuGfGfGfuuguuaccguL96 | 2923 | asdCsggdTadAcaacdCcAfgcguggasasu | 3049 |
| AD-1555242 | cscsacgcugGfGfUfuguuaccgcuL96 | 2924 | asdGscgdGudAacaadCcCfagcguggsasa | 3050 |
| AD-1555243 | csascgcuggGfUfUfguuaccgcuuL96 | 2925 | asdAsgcdGgdTaacadAcCfcagcgugsgsa | 3051 |
| AD-1555247 | csusggguugUfUfAfccgcuacaguL96 | 2926 | asdCsugdTadGcggudAaCfaacccagscsg | 3052 |
| AD-1555342 | gsgsgaccgaCfUfGfgccauguauuL96 | 2927 | asdAsuadCadTggccdAgUfcggucccsgsg | 3053 |
| AD-1555343 | gsgsaccgacUfGfGfccauguauguL96 | 2928 | asdCsaudAcdAuggcdCaGfucgguccscsg | 3054 |
| AD-1555345 | ascscgacugGfCfCfauguaugacuL96 | 2929 | asdGsucdAudAcaugdGcCfagucgguscsc | 3055 |
| AD-1555346 | cscsgacuggCfCfAfuguaugacguL96 | 2930 | asdCsgudCadTacaudGgCfcagucggsusc | 3056 |
| AD-1555348 | gsascuggccAfUfGfuaugacguguL96 | 2931 | asdCsacdGudCauacdAuGfgccagucsgsg | 3057 |
| AD-1555349 | ascsuggccaUfGfUfaugacgugguL96 | 2932 | asdCscadCgdTcauadCaUfggccaguscsg | 3058 |
| AD-1555350 | csusggccauGfUfAfugacguggcuL96 | 2933 | asdGsccdAcdGucaudAcAfuggccagsusc | 3059 |
| AD-1555366 | asgsgcucauCfAfCfcucgguguauL96 | 2934 | asdTsacdAcdCgaggdTgAfugagccuscsu | 3060 |
| AD-1555428 | gscscugcacAfGfCfuacuacgacuL96 | 2935 | asdGsucdGudAguagdCuGfugcaggcscsc | 3061 |
| AD-1555429 | cscsugcacaGfCfUfacuacgaccuL96 | 2936 | asdGsgudCgdTaguadGcUfgugcaggscsc | 3062 |
| AD-1555535 | cscsucucugGfAfCfuacggcuuguL96 | 2937 | asdCsaadGcdCguagdTcCfagagaggsgsc | 3063 |
| AD-1555537 | uscsucuggaCfUfAfcggcuuggcuL96 | 2938 | asdGsccdAadGccgudAgUfccagagasgsg | 3064 |
| AD-1555546 | usascggcuuGfGfCfccucugguuuL96 | 2939 | asdAsacdCadGagggdCcAfagccguasgsu | 3065 |
| AD-1555547 | ascsggcuugGfCfCfcucugguuuuL96 | 2940 | asdAsaadCcdAgaggdGcCfaagccgusasg | 3066 |
| AD-1555548 | csgsgcuuggCfCfCfucugguuuguL96 | 2941 | asdCsaadAcdCagagdGgCfcaagccgsusa | 3067 |
| AD-1555549 | gsgscuuggcCfCfUfcugguuugauL96 | 2942 | asdTscadAadCcagadGgGfccaagccsgsu | 3068 |
| AD-1555581 | gsasggaggcAfGfAfaguaugauuuL96 | 2943 | asdAsaudCadTacuudCuGfccuccucsasg | 3069 |
| AD-1555583 | gsgsaggcagAfAfGfuaugauuuguL96 | 2944 | asdCsaadAudCauacdTuCfugccuccsusc | 3070 |
| AD-1555584 | gsasggcagaAfGfUfaugauuugcuL96 | 2945 | asdGscadAadTcauadCuUfcugccucscsu | 3071 |
| AD-1555585 | asgsgcagaaGfUfAfugauuugccuL96 | 2946 | asdGsgcdAadAucaudAcUfucugccuscsc | 3072 |
| AD-1555586 | gsgscagaagUfAfUfgauuugccguL96 | 2947 | asdCsggdCadAaucadTaCfuucugccsusc | 3073 |
| AD-1555587 | gscsagaaguAfUfGfauuugccguuL96 | 2948 | asdAscgdGcdAaaucdAuAfcuucugcscsu | 3074 |
| AD-1555588 | csasgaaguaUfGfAfuuugccguguL96 | 2949 | asdCsacdGgdCaaaudCaUfacuucugscsc | 3075 |
| AD-1555589 | asgsaaguauGfAfUfuugccgugcuL96 | 2950 | asdGscadCgdGcaaadTcAfuacuucusgsc | 3076 |
| AD-1555590 | gsasaguaugAfUfUfugccgugcauL96 | 2951 | asdTsgcdAcdGgcaadAuCfauacuucsusg | 3077 |
| AD-1555615 | csasguggacGfAfUfccagaacaguL96 | 2952 | asdCsugdTudCuggadTcGfuccacugsgsc | 3078 |
| AD-1555616 | asgsuggacgAfUfCfcagaacagguL96 | 2953 | asdCscudGudTcuggdAuCfguccacusgsg | 3079 |
| AD-1555626 | cscsagaacaGfGfAfggcuguguguL96 | 2954 | asdCsacdAcdAgccudCcUfguucuggsasu | 3080 |
| AD-1555628 | asgsaacaggAfGfGfcuguguggcuL96 | 2955 | asdGsccdAcdAcagcdCuCfcuguucusgsg | 3081 |
| AD-1555706 | usgsugcgggUfGfCfacuauggcuuL96 | 2956 | asdAsgcdCadTagugdCaCfccgcacascsc | 3082 |
| AD-1555707 | gsusgcggguGfCfAfcuauggcuuuL96 | 2957 | asdAsagdCcdAuagudGcAfcccgcacsasc | 3083 |
| AD-1555709 | gscsgggugcAfCfUfauggcuuguuL96 | 2958 | asdAscadAgdCcauadGuGfcacccgcsasc | 3084 |
| AD-1555711 | gsgsgugcacUfAfUfggcuuguacuL96 | 2959 | asdGsuadCadAgccadTaGfugcacccsgsc | 3085 |
| AD-1555717 | ascsuauggcUfUfGfuacaaccaguL96 | 2960 | asdCsugdGudTguacdAaGfccauagusgsc | 3086 |
| AD-1555723 | gscsuuguacAfAfCfcagucggacuL96 | 2961 | asdGsucdCgdAcuggdTuGfuacaagcscsa | 3087 |
| AD-1555725 | csusgcccugGfAfGfaguuccucuuL96 | 2962 | asdAsgadGgdAacucdTcCfagggcagsgsg | 3088 |
| AD-1555768 | gscscuggauGfAfGfagaaacugcuL96 | 2963 | asdGscadGudTucucdTcAfuccaggcscsg | 3089 |
| AD-1555771 | usgsgaugagAfGfAfaacugcguuuL96 | 2964 | asdAsacdGcdAguuudCuCfucauccasgsg | 3090 |
| AD-1555772 | gsgsaugagaGfAfAfacugcguuuuL96 | 2965 | asdAsaadCgdCaguudTcUfcucauccsasg | 3091 |
| AD-1555776 | gsasgagaaaCfUfGfcguuugcaguL96 | 2966 | asdCsugdCadAacgcdAgUfuucucucsasu | 3092 |
| AD-1555789 | ususugcagaGfCfCfacauuccaguL96 | 2967 | asdCsugdGadAugugdGcUfcugcaaascsg | 3093 |
| AD-1555894 | gsusgggacaUfUfCfaccuuccaguL96 | 2968 | asdCsugdGadAggugdAaUfgucccacsasu | 3094 |
| AD-1555895 | usgsggacauUfCfAfccuuccaguuL96 | 2969 | asdAscudGgdAaggudGaAfugucccascsa | 3095 |
| AD-1555897 | gsgsacauucAfCfCfuuccaguguuL96 | 2970 | asdAscadCudGgaagdGuGfaauguccscsa | 3096 |
| AD-1555898 | gsascauucaCfCfUfuccaguguguL96 | 2971 | asdCsacdAcdTggaadGgUfgaaugucscsc | 3097 |
| AD-1555899 | ascsauucacCfUfUfccagugugauL96 | 2972 | asdTscadCadCuggadAgGfugaauguscsc | 3098 |
| AD-1555900 | csasuucaccUfUfCfcagugugaguL96 | 2973 | asdCsucdAcdAcuggdAaGfgugaaugsusc | 3099 |
| AD-1556052 | asuscgcugaCfCfGfcugggugauuL96 | 2974 | asdAsucdAcdCcagcdGgUfcagcgausgsa | 3100 |
| AD-1556057 | usgsaccgcuGfGfGfugauaacaguL96 | 2975 | asdCsugdTudAucacdCcAfgcggucasgsc | 3101 |
| AD-1556126 | csgsuguuccUfGfGfgcaagguguuL96 | 2976 | asdAscadCcdTugccdCaGfgaacacgsgsu | 3102 |
| AD-1556127 | gsusguuccuGfGfGfcaagguguguL96 | 2977 | asdCsacdAcdCuugcdCcAfggaacacsgsg | 3103 |
| AD-1556137 | gscsaaggugUfGfGfcagaacucguL96 | 2978 | asdCsgadGudTcugcdCaCfaccuugcscsc | 3104 |
| AD-1556139 | asasggugugGfCfAfgaacucgcguL96 | 2979 | asdCsgcdGadGuucudGcCfacaccuusgsc | 3105 |
| AD-1556163 | csusggagagGfUfGfuccuucaaguL96 | 2980 | asdCsuudGadAggacdAcCfucuccagsgsc | 3106 |
| AD-1556164 | usgsgagaggUfGfUfccuucaagguL96 | 2981 | asdCscudTgdAaggadCaCfcucuccasgsg | 3107 |
| AD-1556166 | gsasgaggugUfCfCfuucaagguguL96 | 2982 | asdCsacdCudTgaagdGaCfaccucucscsa | 3108 |
| AD-1556167 | asgsagguguCfCfUfucaaggugauL96 | 2983 | asdTscadCcdTugaadGgAfcaccucuscsc | 3109 |
| AD-1556319 | asuscccacaGfGfAfccugugcaguL96 | 2984 | asdCsugdCadCaggudCcUfgugggauscsa | 3110 |
| AD-1556359 | usgsacgccaCfGfCfaugcuguguuL96 | 2985 | asdAscadCadGcaugdCgUfggcgucascsc | 3111 |
| AD-1556360 | gsascgccacGfCfAfugcuguguguL96 | 2986 | asdCsacdAcdAgcaudGcGfuggcgucsasc | 3112 |
| AD-1556382 | gscsuaccgcAfAfGfggcaagaaguL96 | 2987 | asdCsuudCudTgcccdTuGfcgguagcscsg | 3113 |
| AD-1556383 | csusaccgcaAfGfGfgcaagaagguL96 | 2988 | asdCscudTcdTugccdCuUfgcgguagscsc | 3114 |
| AD-1556465 | gsgsccuaacUfAfCfuucggcgucuL96 | 2989 | asdGsacdGcdCgaagdTaGfuuaggccsgsg | 3115 |
| AD-1556466 | gscscuaacuAfCfUfucggcgucuuL96 | 2990 | asdAsgadCgdCcgaadGuAfguuaggcscsg | 3116 |
| AD-1556484 | csusacacccGfCfAfucacagguguL96 | 2991 | asdCsacdCudGugaudGcGfgguguagsasc | 3117 |
| AD-1556510 | gscsuggaucCfAfGfcaagugguguL96 | 2992 | asdCsacdCadCuugcdTgGfauccagcsusg | 3118 |
| AD-1556584 | usgsgcaggaGfGfUfggcaucuuguL96 | 2993 | asdCsaadGadTgccadCcUfccugccascsc | 3119 |
| AD-1556585 | gsgscaggagGfUfGfgcaucuuguuL96 | 2994 | asdAscadAgdAugccdAcCfuccugccsasc | 3120 |
| AD-1556586 | gscsaggaggUfGfGfcaucuugucuL96 | 2995 | asdGsacdAadGaugcdCaCfcuccugcscsa | 3121 |
| AD-1556587 | csasggagguGfGfCfaucuugucuuL96 | 2996 | asdAsgadCadAgaugdCcAfccuccugscsc | 3122 |
| AD-1556613 | usgsaugucuGfCfUfccagugauguL96 | 2997 | asdCsaudCadCuggadGcAfgacaucasgsg | 3123 |
| AD-1556677 | csasauucucUfCfUfccuccguccuL96 | 2998 | asdGsgadCgdGaggadGaGfagaauugsgsg | 3124 |
| AD-1556709 | gsgscucagcAfGfCfaagaaugcuuL96 | 2999 | asdAsgcdAudTcuugdCuGfcugagccsasc | 3125 |
| AD-1556710 | gscsucagcaGfCfAfagaaugcuguL96 | 3000 | asdCsagdCadTucuudGcUfgcugagcscsa | 3126 |
| AD-1556789 | csusggucuaAfCfUfugggaucuguL96 | 3001 | asdCsagdAudCccaadGuUfagaccagsgsg | 3127 |
| AD-1556790 | usgsgucuaaCfUfUfgggaucugguL96 | 3002 | asdCscadGadTcccadAgUfuagaccasgsg | 3128 |
| AD-1556791 | gsgsucuaacUfUfGfggaucuggguL96 | 3003 | asdCsccdAgdAucccdAaGfuuagaccsasg | 3129 |
| AD-1556795 | usasacuuggGfAfUfcugggaauguL96 | 3004 | asdCsaudTcdCcagadTcCfcaaguuasgsa | 3130 |
| AD-1556799 | ususgggaucUfGfGfgaauggaaguL96 | 3005 | asdCsuudCcdAuuccdCaGfaucccaasgsu | 3131 |
| AD-1556802 | gsgsaucuggGfAfAfuggaagguguL96 | 3006 | asdCsacdCudTccaudTcCfcagauccscsa | 3132 |
| AD-1556908 | usgsagcucaGfCfUfgcccuuugguL96 | 3007 | asdCscadAadGggcadGcUfgagcucascsc | 3133 |
| AD-1556909 | gsasgcucagCfUfGfcccuuuggauL96 | 3008 | asdTsccdAadAgggcdAgCfugagcucsasc | 3134 |
| AD-1556911 | gscsucagcuGfCfCfcuuuggaauuL96 | 3009 | asdAsuudCcdAaaggdGcAfgcugagcsusc | 3135 |
| AD-1556915 | asgscugcccUfUfUfggaauaaaguL96 | 3010 | asdCsuudTadTuccadAaGfggcagcusgsa | 3136 |
| AD-1556917 | csusgcccuuUfGfGfaauaaagcuuL96 | 3011 | asdAsgcdTudTauucdCaAfagggcagscsu | 3137 |
| AD-1556918 | usgscccuuuGfGfAfauaaagcuguL96 | 3012 | asdCsagdCudTuauudCcAfaagggcasgsc | 3138 |

TABLE 23
Exemplary dsRNA molecules

| | | SEQ | | SEQ |
|---|---|---|---|---|
| | | ID | | ID |
| Duplex ID | Sense sequence (5′→3′) | NO: | Antisense sequence(5′→3′) | NO: |
| AD- | ascsagacAfaGfAfCfcaucuacacuL96 | 3139 | asdGsugdTadGauggucUfudGucugusgsc | 3153 |
| 1181513.1 | | | | |
| AD- | cscsgagcCfgUfUfCfucuacaauuuL96 | 128 | asdAsaudTgdTagagaaCfgdGcucggsasu | 3154 |
| 1181527.1 | | | | |
| AD- | gsasugccAfaGfAfAfcacuaugauuL96 | 3140 | asdAsucdAudAguguucUfudGgcaucscsu | 3155 |
| 1181564.1 | | | | |
| AD- | ascsagagdAaaUfUfcuacuacauuL96 | 3141 | asdAsugdTadGuagaauUfuCfucugusgsg | 3156 |
| 1181612.1 | | | | |
| AD- | gsasaauuCfuaCfUfacaucuauauL96 | 3142 | asUfsaudAgdAuguadGudAgdAauuucsusc | 3157 |
| 1181618.1 | | | | |
| AD- | csgsagccGfuUfCfUfcuacaauuauL96 | 3143 | asUfsaadTudGuagagadAcdGgcucgsgsc | 3158 |
| 1181537.1 | | | | |
| AD- | csasagccUfuGfGfCfucaauaccauL96 | 3144 | asUfsggdTadTugagccdAadGgcuugsgsc | 3159 |
| 1181552.1 | | | | |
| AD- | asgsaaauUfcUfAfCfuacaucuauuL96 | 84 | asAfsuadGadTguagdTadGaAfuuucuscsu | 3160 |
| 1181601.1 | | | | |
| AD- | gsasgaaaUfuCfUfdAcuacaucuauL96 | 3145 | asUfsagdAudGuagudAgdAaUfuucucsusg | 3161 |
| 1181614.1 | | | | |
| AD- | asgsauccdGagCfCfuacuaugaauL96 | 3146 | asUfsucdAudAguaggcUfcdGgaucususc | 3162 |
| 1181524.1 | | | | |
| AD- | cscsgagcCfgUfUfCfucuacaauuuL96 | 128 | asAfsaudTgdTagagaaCfgdGcucggsasu | 3163 |
| 1181528.1 | | | | |
| AD- | cscsgagcCfgUfUfCfucuacaauuuL96 | 128 | asAfsaudTgdTagagaaCfgdGcucggsgsc | 3164 |
| 1181529.1 | | | | |
| AD- | asgsagaaAfuUfCfUfacuauaucuuL96 | 3147 | asAfsgadTadTaguagaAfuUfucucusgsu | 3165 |
| 1181598.1 | | | | |
| AD- | csasagguCfuUfCfUfcucuggcuguL96 | 3148 | asCfsagdCcdAgagagaAfgAfccuugsgsc | 3166 |
| 1181604.1 | | | | |
| AD- | cscsuacadGagAfAfauucuacuauL96 | 3149 | asUfsagdTadGaauuucUfcUfguaggscsu | 3167 |
| 1181609.1 | | | | |
| AD- | ascsagagAfaAfUfUfcuacuacauuL96 | 3150 | asAfsugdTadGuagaauUfuCfucugusgsg | 3168 |
| 1181611.1 | | | | |
| AD- | gsasaauuCfuAfCfUfacaucuauauL96 | 3151 | asUfsaudAgdAuguaguAfgAfauuucsusc | 3169 |
| 1181617.1 | | | | |
| AD- | ascsccuaCfuCfUfdGuuguucgaauL96 | 3152 | asUfsucdGadAcaacagAfgUfagggusgsg | 3170 |
| 1181619.1 | | | | |
| AD- | csasagguCfuUfCfUfcucuggcuguL96 | 3148 | asCfsagdCcdAgagagaAfgAfccuugsgsc | 3166 |
| 1181604.2 | | | | |

TABLE 24
Exemplary dsRNA molecules

| | | SEQ | | SEQ |
|---|---|---|---|---|
| | | ID | | ID |
| Duplex ID | Sense sequence (5′→3′) | NO: | Antisense sequence (5′→3′) | NO: |
| AD- | csusuaaaAfgGfGfAfcaguauucuaL96 | 3171 | usdAsgadAudAcuguccCfuUfuuaagscsc | 3179 |
| 1143243.1 | | | | |
| AD- | gscsuuaaAfaGfGfGfacaguauucuL96 | 3172 | asdGsaadTadCugucccUfuUfuaagcsasa | 3180 |
| 1143252.1 | | | | |
| AD- | gscsuuaaAfaGfGfGfacaguauucuL96 | 3172 | asdGsaadTadCugucccUfuUfuaagcsgsc | 3181 |
| 1143254.1 | | | | |
| AD- | csusuaaaAfgGfGfAfcaguauucuuL96 | 3173 | asdAsgadAudAcuguccCfuUfuuaagscsc | 3182 |
| 1143278.1 | | | | |
| AD- | usasaaAfgGfGfAfcaguauucuaL96 | 3174 | usdAsgadAudAcuguccCfuUfuuasasg | 3183 |
| 1143245.1 | | | | |
| AD- | ususaaAfaGfGfGfacaguauucuL96 | 3175 | asdGsaadTadCugucccUfuUfuaasgsc | 3184 |
| 1143256.1 | | | | |
| AD- | usasaaAfgGfGfAfcaguauucuuL96 | 3176 | asdAsgadAudAcuguccCfuUfuuasasg | 3185 |
| 1143280.1 | | | | |
| AD- | asasaaggGfaCfAfGfuauucucaguL96 | 3177 | asCfsugdAgdAauacugUfcCfcuuuusasa | 3186 |
| 1143286.1 | | | | |
| AD- | asasaaggGfaCfAfGfuauucucaguL96 | 3177 | asCfsugdAgdAauacugUfcCfcuuuusgsc | 3187 |
| 1143287.1 | | | | |
| AD- | asasaaggGfaCfAfGfuauucucaguL96 | 3177 | asCfsugdAgdAauacugUfcCfcuuuuscsc | 3188 |
| 1143288.1 | | | | |
| AD- | asasggGfaCfAfGfuauucucaguL96 | 3178 | asCfsugdAgdAauacugUfcCfcuususu | 3189 |
| 1143289.1 | | | | |

TABLE 25
Exemplary dsRNA molecules

| | | SEQ | | SEQ |
|---|---|---|---|---|
| | | ID | | ID |
| Duplex ID | Sense sequence (5′→3′) | NO: | Antisense sequence (5′→3′) | NO: |
| AD- | csusuc(Uhd)gGfuCfUfAfaacaaacusasa | 3190 | VPusUfsagdTudTguuuagAfcCfagaagsasu | 3212 |
| 1231468 | | | | |
| AD- | ususaau(Chd)UfcAfCfAfuaguaaucsusa | 3191 | VPusAfsgadTudAcuauguGfaGfauuaasasg | 3213 |
| 1231470 | | | | |
| AD- | usasacu(Uhd)UfaAfUfCfucauauagscsa | 3192 | VPusGfscudAudAugagauUfaAfaguuasasc | 3214 |
| 1231471 | | | | |
| AD- | cscsuga(Uhd)CfuUfCfUfgguuuaaascsa | 3193 | VPusGfsuudTadAaccagaAfgAfucaggsasa | 3215 |
| 1231472 | | | | |
| AD- | usgsua(Chd)aGfuAfAfGfugauaacasgsa | 3194 | VPusCfsugdTudAucacuuAfcUfguacasasg | 3216 |
| 1231473 | | | | |
| AD- | ususcgugGfuAfUfUfcuua(Chd)uagsusa | 3195 | VPusAfscudAgdTaagaauAfcCfacgaasasg | 3217 |
| 1231478 | | | | |
| AD- | uscsuuc(Uhd)GfgUfCfUfaaaugaacsusa | 3196 | VPusAfsgudTcdAuuuagaCfcAfgaagasusc | 3218 |
| 1231479 | | | | |
| AD- | uscsgug(Chd)UfaCfAfAfcuuucucasasa | 3197 | VPusUfsugdAgdAaaguugUfaGfcacgasusu | 3219 |
| 1231485 | | | | |
| AD | gsusugugUfaCfAfCfacau(Uhd)ggusasa | 3198 | VPusUfsacdCadAugugugUfaCfacaacsasu | 3220 |
| 1231492 | | | | |
| AD- | csgsugc(Uhd)AfcAfAfCfuucuucaasgsa | 3199 | VPusCfsuudGadAgaaguuGfuAfgcacgsasu | 3221 |
| 1231496 | | | | |
| AD- | usgsaaa(Uhd)UfgUfUfGfacauugugsasa | 3200 | VPusUfscadCadAugucaaCfaAfuuucasgsc | 3222 |
| 1231497 | | | | |
| AD- | ascsaaug(Uhd)uGfCfUfuuuuaaacsusa | 3201 | VPusAfsgudTudAaaaagcAfaCfauugususa | 3223 |
| 1231498 | | | | |
| AD- | asasauugUfuGfAfCfacua(Uhd)gagsusa | 3202 | VPusAfscudCadTagugucAfaCfaauuuscsa | 3224 |
| 1231499 | | | | |
| AD- | gscsugaaAfuUfGfUfugaua(Chd)ugsusa | 3203 | VPusAfscadGudAucaacaAfuUfucagcsasg | 3225 |
| 1231502 | | | | |
| AD- | usgsuugaCfaCfUfGfugaa(Uhd)gcususa | 3204 | VPusAfsagdCadTucacagUfgUfcaacasasu | 3226 |
| 1231505 | | | | |
| AD- | ascsauugCfcAfAfAfaggu(Uhd)ucusasa | 3205 | VPusUfsagdAadAccuuuuGfgCfaaugususg | 3227 |
| 1231507 | | | | |
| AD- | ususcug(Chd)UfaAfUfCfuuguugcusasa | 3206 | VPusUfsagdCadAcaagauUfaGfcagaasgsc | 3228 |
| 1231513 | | | | |
| AD- | asuscuugUfuUfUfCfucua(Uhd)ucasasa | 3207 | VPusUfsugdAadTagagaaAfaCfaagausgsa | 3229 |
| 1231519 | | | | |
| AD- | csasgucaUfaAfUfCfuaua(Uhd)uaasasa | 3208 | VPusUfsuudAadTauagauUfaUfgacugsusg | 3230 |
| 1231520 | | | | |
| AD- | usgsguaaCfaCfUfAfauaa(Uhd)aaasasa | 3209 | VPusUfsuudTadTuauuagUfgUfuaccascsa | 3231 |
| 1231521 | | | | |
| AD- | cscsucauGfgAfAfGfagaagcagauL96 | 3210 | asUfscudGcdTucucuuCfcAfugaggscsu | 3232 |
| 1523180.1 | | | | |
| AD- | cscsggu(Chd)AfgGfUfUfcugcuuuusasa | 3211 | VPusUfsaadAadGcagaacCfudGaccggscsc | 3233 |
| 1498528 | | | | |

[0446] All of the U.S. patents, U.S. patent application publications, foreign patents, foreign patent applications and non-patent publications referred to in this specification are incorporated herein by reference, in their entirety. Aspects of the embodiments can be modified, if necessary to employ concepts of the various patents, applications and publications to provide yet further embodiments.

[0447] These and other changes can be made to the embodiments in light of the above-detailed description. In general, in the following claims, the terms used should not be construed to limit the claims to the specific embodiments disclosed in the specification and the claims, but should be construed to include all possible embodiments along with the full scope of equivalents to which such claims are entitled. Accordingly, the claims are not limited by the disclosure.

The application's sequence listing, which the Patent Office published only in electronic form, follows.

SEQUENCE LISTING (3233 sequences)

SEQ ID NO: 1 - protein, 16 aa, Unknown
  Description of Unknown: RFGF peptide sequence
AAVALLPAVLLALLAP

SEQ ID NO: 2 - protein, 11 aa, Unknown
  Description of Unknown: RFGF analogue peptide sequence
AALLPVLLAAP

SEQ ID NO: 3 - protein, 13 aa, Human immunodeficiency virus
GRKKRRQRRRPPQ

SEQ ID NO: 4 - protein, 16 aa, Drosophila sp.
RQIKIWFQNRRMKWKK

SEQ ID NO: 5 - RNA, 21 nt, Artificial Sequence
  Description of Artificial Sequence: Synthetic oligonucleotide
ucucccaccuuuucuucuaau

SEQ ID NO: 6 - RNA, 21 nt, Artificial Sequence
  Description of Artificial Sequence: Synthetic oligonucleotide
cacaaugagaguaccugugaa

SEQ ID NO: 7 - RNA, 21 nt, Artificial Sequence
  Description of Artificial Sequence: Synthetic oligonucleotide
ccucaacuggaugaagaaacu

SEQ ID NO: 8 - RNA, 21 nt, Artificial Sequence
  Description of Artificial Sequence: Synthetic oligonucleotide
gcugagaagauugacagguua

SEQ ID NO: 9 - RNA, 21 nt, Artificial Sequence
  Description of Artificial Sequence: Synthetic oligonucleotide
gaagcaccugaacaccgucau

SEQ ID NO: 10 - RNA, 21 nt, Artificial Sequence
  Description of Artificial Sequence: Synthetic oligonucleotide
aaugugcaguuuuccuugauu

SEQ ID NO: 11 - RNA, 21 nt, Artificial Sequence
  Description of Artificial Sequence: Synthetic oligonucleotide
uccuuguuuaaaugguggaau

SEQ ID NO: 12 - RNA, 21 nt, Artificial Sequence
  Description of Artificial Sequence: Synthetic oligonucleotide
aaaauggcaggugcaagcagu

SEQ ID NO: 13 - RNA, 21 nt, Artificial Sequence
  Description of Artificial Sequence: Synthetic oligonucleotide
ucauucaagaugacaucacuu

SEQ ID NO: 14 - RNA, 21 nt, Artificial Sequence
  Description of Artificial Sequence: Synthetic oligonucleotide
gaacuggauaaaccuuuaaua

SEQ ID NO: 15 - RNA, 21 nt, Artificial Sequence
  Description of Artificial Sequence: Synthetic oligonucleotide
ugaaggaggcaaagauucguu

SEQ ID NO: 16 - RNA, 21 nt, Artificial Sequence
  Description of Artificial Sequence: Synthetic oligonucleotide
aauauauacuaagguuucccu

SEQ ID NO: 17 - RNA, 21 nt, Artificial Sequence
  Description of Artificial Sequence: Synthetic oligonucleotide
acagacuagucuuucuaccuu

SEQ ID NO: 18 - RNA, 21 nt, Artificial Sequence
  Description of Artificial Sequence: Synthetic oligonucleotide
cauaaggcgugaugguucuuu

SEQ ID NO: 19 - RNA, 21 nt, Artificial Sequence
  Description of Artificial Sequence: Synthetic oligonucleotide
uuuauggccagaagaauacaa

SEQ ID NO: 20 - RNA, 21 nt, Artificial Sequence
  Description of Artificial Sequence: Synthetic oligonucleotide
cucuccgucauucucaccuuu

SEQ ID NO: 21 - RNA, 21 nt, Artificial Sequence
  Description of Artificial Sequence: Synthetic oligonucleotide
ucucaucugagacuuggugaa

SEQ ID NO: 22 - RNA, 21 nt, Artificial Sequence
  Description of Artificial Sequence: Synthetic oligonucleotide
gacucugcuaacguuccacua

SEQ ID NO: 23 - RNA, 21 nt, Artificial Sequence
  Description of Artificial Sequence: Synthetic oligonucleotide
ugugcaaugaaaggcaaauau

SEQ ID NO: 24 - RNA, 21 nt, Artificial Sequence
  Description of Artificial Sequence: Synthetic oligonucleotide
caguguucuugcucuauaaaa

SEQ ID NO: 25 - RNA, 21 nt, Artificial Sequence
  Description of Artificial Sequence: Synthetic oligonucleotide
ucuugcucuauaaaccguguu

SEQ ID NO: 26 - RNA, 21 nt, Artificial Sequence
  Description of Artificial Sequence: Synthetic oligonucleotide
aguguucuugcucuauaaaca

SEQ ID NO: 27 - RNA, 21 nt, Artificial Sequence
  Description of Artificial Sequence: Synthetic oligonucleotide
agaacuggacaccaaaucgua

SEQ ID NO: 28 - RNA, 21 nt, Artificial Sequence
  Description of Artificial Sequence: Synthetic oligonucleotide
acaguguucuugcucuauaaa

SEQ ID NO: 29 - RNA, 21 nt, Artificial Sequence
  Description of Artificial Sequence: Synthetic oligonucleotide
uucuugcucuauaaaccgugu

SEQ ID NO: 30 - RNA, 21 nt, Artificial Sequence
  Description of Artificial Sequence: Synthetic oligonucleotide
guguucuugcucuauaaacca

SEQ ID NO: 31 - RNA, 21 nt, Artificial Sequence
  Description of Artificial Sequence: Synthetic oligonucleotide
aacuggacaccaaaucguacu

SEQ ID NO: 32 - RNA, 21 nt, Artificial Sequence
  Description of Artificial Sequence: Synthetic oligonucleotide
caggaggaccaggaucuugca

SEQ ID NO: 33 - RNA, 21 nt, Artificial Sequence
  Description of Artificial Sequence: Synthetic oligonucleotide
caauaaaacauuccugugaaa

SEQ ID NO: 34 - RNA, 21 nt, Artificial Sequence
  Description of Artificial Sequence: Synthetic oligonucleotide
cuaaagcaguguuuucaccua

SEQ ID NO: 35 - RNA, 21 nt, Artificial Sequence
  Description of Artificial Sequence: Synthetic oligonucleotide
cagagacaauaaaacauuccu

SEQ ID NO: 36 - RNA, 21 nt, Artificial Sequence
  Description of Artificial Sequence: Synthetic oligonucleotide
uccucugauggucaaaguccu

SEQ ID NO: 37 - RNA, 23 nt, Artificial Sequence
  Description of Artificial Sequence: Synthetic oligonucleotide
auuagaagaaaaggugggagacu

SEQ ID NO: 38 - RNA, 23 nt, Artificial Sequence
  Description of Artificial Sequence: Synthetic oligonucleotide
uucacagguacucucauugugga

SEQ ID NO: 39 - RNA, 23 nt, Artificial Sequence
  Description of Artificial Sequence: Synthetic oligonucleotide
aguuucuucauccaguugaggga

SEQ ID NO: 40 - RNA, 23 nt, Artificial Sequence
  Description of Artificial Sequence: Synthetic oligonucleotide
uaaccugucaaucuucucagcag

SEQ ID NO: 41 - RNA, 23 nt, Artificial Sequence
  Description of Artificial Sequence: Synthetic oligonucleotide
augacgguguucaggugcuucau

SEQ ID NO: 42 - RNA, 23 nt, Artificial Sequence
  Description of Artificial Sequence: Synthetic oligonucleotide
aaucaaggaaaacugcacauucg

SEQ ID NO: 43 - RNA, 23 nt, Artificial Sequence
  Description of Artificial Sequence: Synthetic oligonucleotide
auuccaccauuuaaacaaggauu

SEQ ID NO: 44 - RNA, 23 nt, Artificial Sequence
  Description of Artificial Sequence: Synthetic oligonucleotide
acugcuugcaccugccauuuuua

SEQ ID NO: 45 - RNA, 23 nt, Artificial Sequence
  Description of Artificial Sequence: Synthetic oligonucleotide
aagugaugucaucuugaaugaau

SEQ ID NO: 46 - RNA, 23 nt, Artificial Sequence
  Description of Artificial Sequence: Synthetic oligonucleotide
uauuaaagguuuauccaguucca

SEQ ID NO: 47 - RNA, 23 nt, Artificial Sequence
  Description of Artificial Sequence: Synthetic oligonucleotide
aacgaaucuuugccuccuucacg

SEQ ID NO: 48 - RNA, 23 nt, Artificial Sequence
  Description of Artificial Sequence: Synthetic oligonucleotide
agggaaaccuuaguauauauucc

SEQ ID NO: 49 - RNA, 23 nt, Artificial Sequence
  Description of Artificial Sequence: Synthetic oligonucleotide
aagguagaaagacuagucuguaa

SEQ ID NO: 50 - RNA, 23 nt, Artificial Sequence
  Description of Artificial Sequence: Synthetic oligonucleotide
aaagaaccaucacgccuuauggg

SEQ ID NO: 51 - RNA, 23 nt, Artificial Sequence
  Description of Artificial Sequence: Synthetic oligonucleotide
uuguauucuucuggccauaaaug

SEQ ID NO: 52 - RNA, 23 nt, Artificial Sequence
  Description of Artificial Sequence: Synthetic oligonucleotide
aaaggugagaaugacggagaggu

SEQ ID NO: 53 - RNA, 23 nt, Artificial Sequence
  Description of Artificial Sequence: Synthetic oligonucleotide
uucaccaagucucagaugagaaa

SEQ ID NO: 54 - RNA, 23 nt, Artificial Sequence
  Description of Artificial Sequence: Synthetic oligonucleotide
uaguggaacguuagcagagucag

SEQ ID NO: 55 - RNA, 23 nt, Artificial Sequence
  Description of Artificial Sequence: Synthetic oligonucleotide
auauuugccuuucauugcacacu

SEQ ID NO: 56 - RNA, 23 nt, Artificial Sequence
  Description of Artificial Sequence: Synthetic oligonucleotide
uuuuauagagcaagaacacuguu

SEQ ID NO: 57 - RNA, 23 nt, Artificial Sequence
  Description of Artificial Sequence: Synthetic oligonucleotide
aacacgguuuauagagcaagaac

SEQ ID NO: 58 - RNA, 23 nt, Artificial Sequence
  Description of Artificial Sequence: Synthetic oligonucleotide
uguuuauagagcaagaacacugu

SEQ ID NO: 59 - RNA, 23 nt, Artificial Sequence
  Description of Artificial Sequence: Synthetic oligonucleotide
uacgauuugguguccaguucuac

SEQ ID NO: 60 - RNA, 23 nt, Artificial Sequence
  Description of Artificial Sequence: Synthetic oligonucleotide
uuuauagagcaagaacacuguuu

SEQ ID NO: 61 - RNA, 23 nt, Artificial Sequence
  Description of Artificial Sequence: Synthetic oligonucleotide
acacgguuuauagagcaagaaca

SEQ ID NO: 62 - RNA, 23 nt, Artificial Sequence
  Description of Artificial Sequence: Synthetic oligonucleotide
ugguuuauagagcaagaacacug

SEQ ID NO: 63 - RNA, 23 nt, Artificial Sequence
  Description of Artificial Sequence: Synthetic oligonucleotide
aguacgauuugguguccaguucu

SEQ ID NO: 64 - RNA, 23 nt, Artificial Sequence
  Description of Artificial Sequence: Synthetic oligonucleotide
ugcaagauccugguccuccuggg

SEQ ID NO: 65 - RNA, 23 nt, Artificial Sequence
  Description of Artificial Sequence: Synthetic oligonucleotide
uuucacaggaauguuuuauuguc

SEQ ID NO: 66 - RNA, 23 nt, Artificial Sequence
  Description of Artificial Sequence: Synthetic oligonucleotide
uaggugaaaacacugcuuuagua

SEQ ID NO: 67 - RNA, 23 nt, Artificial Sequence
  Description of Artificial Sequence: Synthetic oligonucleotide
aggaauguuuuauugucucugcc

SEQ ID NO: 68 - RNA, 23 nt, Artificial Sequence
  Description of Artificial Sequence: Synthetic oligonucleotide
aggacuuugaccaucagaggaca

SEQ ID NO: 69 - RNA, 21 nt, Artificial Sequence
  Description of Artificial Sequence: Synthetic oligonucleotide
aaaaauguucucaaaaaugaa

SEQ ID NO: 70 - RNA, 21 nt, Artificial Sequence
  Description of Artificial Sequence: Synthetic oligonucleotide
aaaaucaccacucuuugggca

SEQ ID NO: 71 - RNA, 21 nt, Artificial Sequence
  Description of Artificial Sequence: Synthetic oligonucleotide
aaagugggagacccuguguaa

SEQ ID NO: 72 - RNA, 21 nt, Artificial Sequence
  Description of Artificial Sequence: Synthetic oligonucleotide
aaaugaaagacaaagguggau

SEQ ID NO: 73 - RNA, 21 nt, Artificial Sequence
  Description of Artificial Sequence: Synthetic oligonucleotide
aaaugaggguuucacagucaa

SEQ ID NO: 74 - RNA, 21 nt, Artificial Sequence
  Description of Artificial Sequence: Synthetic oligonucleotide
aacuugcuacccauuaggaua

SEQ ID NO: 75 - RNA, 21 nt, Artificial Sequence
  Description of Artificial Sequence: Synthetic oligonucleotide
aaucaccacucuuugggcagu

SEQ ID NO: 76 - RNA, 21 nt, Artificial Sequence
  Description of Artificial Sequence: Synthetic oligonucleotide
acaugggccaguggaagauca

SEQ ID NO: 77 - RNA, 21 nt, Artificial Sequence
  Description of Artificial Sequence: Synthetic oligonucleotide
accaggaacugaaccuugaua

SEQ ID NO: 78 - RNA, 21 nt, Artificial Sequence
  Description of Artificial Sequence: Synthetic oligonucleotide
accaggaugccacuaugucua

SEQ ID NO: 79 - RNA, 21 nt, Artificial Sequence
  Description of Artificial Sequence: Synthetic oligonucleotide
accuaacuaaaauaauguuua

SEQ ID NO: 80 - RNA, 21 nt, Artificial Sequence
  Description of Artificial Sequence: Synthetic oligonucleotide
accucgccugguccugauuua

SEQ ID NO: 81 - RNA, 21 nt, Artificial Sequence
  Description of Artificial Sequence: Synthetic oligonucleotide
accuguugaauuuuguauuau

SEQ ID NO: 82 - RNA, 21 nt, Artificial Sequence
  Description of Artificial Sequence: Synthetic oligonucleotide
acuacaugaaccuacagagau

SEQ ID NO: 83 - RNA, 21 nt, Artificial Sequence
  Description of Artificial Sequence: Synthetic oligonucleotide
acugauuauggaauaguucuu

SEQ ID NO: 84 - RNA, 21 nt, Artificial Sequence
  Description of Artificial Sequence: Synthetic oligonucleotide
agaaauucuacuacaucuauu

SEQ ID NO: 85 - RNA, 21 nt, Artificial Sequence
  Description of Artificial Sequence: Synthetic oligonucleotide
agacaggauucugaaaacuca

SEQ ID NO: 86 - RNA, 21 nt, Artificial Sequence
  Description of Artificial Sequence: Synthetic oligonucleotide
agagcggguaccucuucauca

SEQ ID NO: 87 - RNA, 21 nt, Artificial Sequence
  Description of Artificial Sequence: Synthetic oligonucleotide
agcaaaggucacaauuuccua

SEQ ID NO: 88 - RNA, 21 nt, Artificial Sequence
  Description of Artificial Sequence: Synthetic oligonucleotide
agcauaaauguuuucgaaaua

SEQ ID NO: 89 - RNA, 21 nt, Artificial Sequence
  Description of Artificial Sequence: Synthetic oligonucleotide
agcaugagguucuuagaaugu

SEQ ID NO: 90 - RNA, 21 nt, Artificial Sequence
  Description of Artificial Sequence: Synthetic oligonucleotide
aggaagcaaccuuucgccugu

SEQ ID NO: 91 - RNA, 21 nt, Artificial Sequence
  Description of Artificial Sequence: Synthetic oligonucleotide
aggaccagauugcuuacucaa

SEQ ID NO: 92 - RNA, 21 nt, Artificial Sequence
  Description of Artificial Sequence: Synthetic oligonucleotide
aggagaagaaaagugauucaa

SEQ ID NO: 93 - RNA, 21 nt, Artificial Sequence
  Description of Artificial Sequence: Synthetic oligonucleotide
agucuucaaguuggcaaaaua

SEQ ID NO: 94 - RNA, 21 nt, Artificial Sequence
  Description of Artificial Sequence: Synthetic oligonucleotide
aguggacuauguguacaagau

SEQ ID NO: 95 - RNA, 21 nt, Artificial Sequence
  Description of Artificial Sequence: Synthetic oligonucleotide
aguuccuaucuccuuucagaa

SEQ ID NO: 96 - RNA, 21 nt, Artificial Sequence
  Description of Artificial Sequence: Synthetic oligonucleotide
auaaugucuuauguaaugcuu

SEQ ID NO: 97 - RNA, 21 nt, Artificial Sequence
  Description of Artificial Sequence: Synthetic oligonucleotide
auacaugagcaagauuugcaa

SEQ ID NO: 98 - RNA, 21 nt, Artificial Sequence
  Description of Artificial Sequence: Synthetic oligonucleotide
aucaaccaggagggaaacaua

SEQ ID NO: 99 - RNA, 21 nt, Artificial Sequence
  Description of Artificial Sequence: Synthetic oligonucleotide
aucaucuuugggucauucuuu

SEQ ID NO: 100 - RNA, 21 nt, Artificial Sequence
  Description of Artificial Sequence: Synthetic oligonucleotide
aucugaugaaguauauuuuuu

SEQ ID NO: 101 - RNA, 21 nt, Artificial Sequence
  Description of Artificial Sequence: Synthetic oligonucleotide
aucuucuuugucguagugauu

SEQ ID NO: 102 - RNA, 21 nt, Artificial Sequence
  Description of Artificial Sequence: Synthetic oligonucleotide
augcugagaaauugucgaaaa

SEQ ID NO: 103 - RNA, 21 nt, Artificial Sequence
  Description of Artificial Sequence: Synthetic oligonucleotide
auggcuuguuccagaugcauu

SEQ ID NO: 104 - RNA, 21 nt, Artificial Sequence
  Description of Artificial Sequence: Synthetic oligonucleotide
auguaccaugcuaaggccaaa

SEQ ID NO: 105 - RNA, 21 nt, Artificial Sequence
  Description of Artificial Sequence: Synthetic oligonucleotide
augucgaguacacuuuuacuu

SEQ ID NO: 106 - RNA, 21 nt, Artificial Sequence
  Description of Artificial Sequence: Synthetic oligonucleotide
auguuaguagaauaagccuua

SEQ ID NO: 107 - RNA, 21 nt, Artificial Sequence
  Description of Artificial Sequence: Synthetic oligonucleotide
auuaggauaaugucuuaugua

SEQ ID NO: 108 - RNA, 21 nt, Artificial Sequence
  Description of Artificial Sequence: Synthetic oligonucleotide
auucucuucguucacagauga

SEQ ID NO: 109 - RNA, 21 nt, Artificial Sequence
  Description of Artificial Sequence: Synthetic oligonucleotide
caacacuugaagcaugguguu

SEQ ID NO: 110 - RNA, 21 nt, Artificial Sequence
  Description of Artificial Sequence: Synthetic oligonucleotide
caagauuugcaacuugcuaca

SEQ ID NO: 111 - RNA, 21 nt, Artificial Sequence
  Description of Artificial Sequence: Synthetic oligonucleotide
caaggucuacgccuauuacau

SEQ ID NO: 112 - RNA, 21 nt, Artificial Sequence
  Description of Artificial Sequence: Synthetic oligonucleotide
cacccucaucaucuaccugga

SEQ ID NO: 113 - RNA, 21 nt, Artificial Sequence
  Description of Artificial Sequence: Synthetic oligonucleotide
caccguauccacugggaaucu

SEQ ID NO: 114 - RNA, 21 nt, Artificial Sequence
  Description of Artificial Sequence: Synthetic oligonucleotide
caccuuuuucaccuaacuaaa

SEQ ID NO: 115 - RNA, 21 nt, Artificial Sequence
  Description of Artificial Sequence: Synthetic oligonucleotide
caccuuuuucaccuaacuaau

SEQ ID NO: 116 - RNA, 21 nt, Artificial Sequence
  Description of Artificial Sequence: Synthetic oligonucleotide
cacuccuuccugauuguguuu

SEQ ID NO: 117 - RNA, 21 nt, Artificial Sequence
  Description of Artificial Sequence: Synthetic oligonucleotide
cagaacgaaaguuauauggaa

SEQ ID NO: 118 - RNA, 21 nt, Artificial Sequence
  Description of Artificial Sequence: Synthetic oligonucleotide
cagagaaauucuacuacaucu

SEQ ID NO: 119 - RNA, 21 nt, Artificial Sequence
  Description of Artificial Sequence: Synthetic oligonucleotide
caugaacgacuucuuccacuu

SEQ ID NO: 120 - RNA, 21 nt, Artificial Sequence
  Description of Artificial Sequence: Synthetic oligonucleotide
caugagcaagauuugcaacuu

SEQ ID NO: 121 - RNA, 21 nt, Artificial Sequence
  Description of Artificial Sequence: Synthetic oligonucleotide
caugguguuucagaacugaga

SEQ ID NO: 122 - RNA, 21 nt, Artificial Sequence
  Description of Artificial Sequence: Synthetic oligonucleotide
cauugagaacccggaaggcau

SEQ ID NO: 123 - RNA, 21 nt, Artificial Sequence
  Description of Artificial Sequence: Synthetic oligonucleotide
ccacagccaaagauaagaacu

SEQ ID NO: 124 - RNA, 21 nt, Artificial Sequence
  Description of Artificial Sequence: Synthetic oligonucleotide
ccagauccacuucaccaagau

SEQ ID NO: 125 - RNA, 21 nt, Artificial Sequence
  Description of Artificial Sequence: Synthetic oligonucleotide
ccauuaggauaaugucuuauu

SEQ ID NO: 126 - RNA, 21 nt, Artificial Sequence
  Description of Artificial Sequence: Synthetic oligonucleotide
cccgucgugcguuggcucaau

SEQ ID NO: 127 - RNA, 21 nt, Artificial Sequence
  Description of Artificial Sequence: Synthetic oligonucleotide
ccgacccaaggaccagauugu

SEQ ID NO: 128 - RNA, 21 nt, Artificial Sequence
  Description of Artificial Sequence: Synthetic oligonucleotide
ccgagccguucucuacaauuu

SEQ ID NO: 129 - RNA, 21 nt, Artificial Sequence
  Description of Artificial Sequence: Synthetic oligonucleotide
ccguauguccuggaauauuau

SEQ ID NO: 130 - RNA, 21 nt, Artificial Sequence
  Description of Artificial Sequence: Synthetic oligonucleotide
ccuaacuaaaauaauguuuaa

SEQ ID NO: 131 - RNA, 21 nt, Artificial Sequence
  Description of Artificial Sequence: Synthetic oligonucleotide
ccuugucuucucagaaccaga

SEQ ID NO: 132 - RNA, 21 nt, Artificial Sequence
  Description of Artificial Sequence: Synthetic oligonucleotide
cgacaucugcccuaaagucaa

SEQ ID NO: 133 - RNA, 21 nt, Artificial Sequence
  Description of Artificial Sequence: Synthetic oligonucleotide
cgugcguuggcucaaugaacu

SEQ ID NO: 134 - RNA, 21 nt, Artificial Sequence
  Description of Artificial Sequence: Synthetic oligonucleotide
cuacccuacucuguuguucga

SEQ ID NO: 135 - RNA, 21 nt, Artificial Sequence
  Description of Artificial Sequence: Synthetic oligonucleotide
cuacugcagcuaaaagacuuu

SEQ ID NO: 136 - RNA, 21 nt, Artificial Sequence
  Description of Artificial Sequence: Synthetic oligonucleotide
cuagugcuguccagugagaaa

SEQ ID NO: 137 - RNA, 21 nt, Artificial Sequence
  Description of Artificial Sequence: Synthetic oligonucleotide
cuauuaauggucagacuguua

SEQ ID NO: 138 - RNA, 21 nt, Artificial Sequence
  Description of Artificial Sequence: Synthetic oligonucleotide
cuccauggcggggguaacaaa

SEQ ID NO: 139 - RNA, 21 nt, Artificial Sequence
  Description of Artificial Sequence: Synthetic oligonucleotide
cugaguugguuuuaugaaaau

SEQ ID NO: 140 - RNA, 21 nt, Artificial Sequence
  Description of Artificial Sequence: Synthetic oligonucleotide
cugcccaaaauacugauaaua

SEQ ID NO: 141 - RNA, 21 nt, Artificial Sequence
  Description of Artificial Sequence: Synthetic oligonucleotide
cugggaggacccugguaagca

SEQ ID NO: 142 - RNA, 21 nt, Artificial Sequence
  Description of Artificial Sequence: Synthetic oligonucleotide
cuguggaggagaagaaaagua

SEQ ID NO: 143 - RNA, 21 nt, Artificial Sequence
  Description of Artificial Sequence: Synthetic oligonucleotide
cuucuuauuggugacguggaa

SEQ ID NO: 144 - RNA, 21 nt, Artificial Sequence
  Description of Artificial Sequence: Synthetic oligonucleotide
cuuguuccagaugcauuuuaa

SEQ ID NO: 145 - RNA, 21 nt, Artificial Sequence
  Description of Artificial Sequence: Synthetic oligonucleotide
cuuugucguagugauuuuccu

SEQ ID NO: 146 - RNA, 21 nt, Artificial Sequence
  Description of Artificial Sequence: Synthetic oligonucleotide
gacagacaagaccaucuacau

SEQ ID NO: 147 - RNA, 21 nt, Artificial Sequence
  Description of Artificial Sequence: Synthetic oligonucleotide
gagaaauucuacuacaucuau

SEQ ID NO: 148 - RNA, 21 nt, Artificial Sequence
  Description of Artificial Sequence: Synthetic oligonucleotide
gagaaccagaaacaaugccau

SEQ ID NO: 149 - RNA, 21 nt, Artificial Sequence
  Description of Artificial Sequence: Synthetic oligonucleotide
gaggucaagacaucuuuauga

SEQ ID NO: 150 - RNA, 21 nt, Artificial Sequence
  Description of Artificial Sequence: Synthetic oligonucleotide
gagugcuccuucuccaguucu

SEQ ID NO: 151 - RNA, 21 nt, Artificial Sequence
  Description of Artificial Sequence: Synthetic oligonucleotide
gauuugcaacuugcuacccau

SEQ ID NO: 152 - RNA, 21 nt, Artificial Sequence
  Description of Artificial Sequence: Synthetic oligonucleotide
gcacagggaaccucuaccuua

SEQ ID NO: 153 - RNA, 21 nt, Artificial Sequence
  Description of Artificial Sequence: Synthetic oligonucleotide
gcaggcagagcgcagcgggau

SEQ ID NO: 154 - RNA, 21 nt, Artificial Sequence
  Description of Artificial Sequence: Synthetic oligonucleotide
gccauuccccucagcuaauga

SEQ ID NO: 155 - RNA, 21 nt, Artificial Sequence
  Description of Artificial Sequence: Synthetic oligonucleotide
gccucuucuuaacaaauuucu

SEQ ID NO: 156 - RNA, 21 nt, Artificial Sequence
  Description of Artificial Sequence: Synthetic oligonucleotide
gcguuguaguuccuaucuccu

SEQ ID NO: 157 - RNA, 21 nt, Artificial Sequence
  Description of Artificial Sequence: Synthetic oligonucleotide
gcucaucaugugcacuauucu

SEQ ID NO: 158 - RNA, 21 nt, Artificial Sequence
  Description of Artificial Sequence: Synthetic oligonucleotide
gcugaggagaauugcuucauu

SEQ ID NO: 159 - RNA, 21 nt, Artificial Sequence
  Description of Artificial Sequence: Synthetic oligonucleotide
gcugaguugguuuuaugaaaa

SEQ ID NO: 160 - RNA, 21 nt, Artificial Sequence
  Description of Artificial Sequence: Synthetic oligonucleotide
gcuucucagacagcauuggau

SEQ ID NO: 161 - RNA, 21 nt, Artificial Sequence
  Description of Artificial Sequence: Synthetic oligonucleotide
ggaccagauugcuuacucaga

SEQ ID NO: 162 - RNA, 21 nt, Artificial Sequence
  Description of Artificial Sequence: Synthetic oligonucleotide
ggagguugugcugagccggaa

SEQ ID NO: 163 - RNA, 21 nt, Artificial Sequence
  Description of Artificial Sequence: Synthetic oligonucleotide
ggcacaugaacgacuucuuca

SEQ ID NO: 164 - RNA, 21 nt, Artificial Sequence
  Description of Artificial Sequence: Synthetic oligonucleotide
ggccuuaucccuccuuccuua

SEQ ID NO: 165 - RNA, 21 nt, Artificial Sequence
  Description of Artificial Sequence: Synthetic oligonucleotide
ggcuggauuuccuaauuguuu

SEQ ID NO: 166 - RNA, 21 nt, Artificial Sequence
  Description of Artificial Sequence: Synthetic oligonucleotide
gggaaaacaaucuuccguuua

SEQ ID NO: 167 - RNA, 21 nt, Artificial Sequence
  Description of Artificial Sequence: Synthetic oligonucleotide
gggguaacaagaugauaaucu

SEQ ID NO: 168 - RNA, 21 nt, Artificial Sequence
  Description of Artificial Sequence: Synthetic oligonucleotide
ggugucucaaugcuucaaugu

SEQ ID NO: 169 - RNA, 21 nt, Artificial Sequence
  Description of Artificial Sequence: Synthetic oligonucleotide
guaaugcaggacuucuucauu

SEQ ID NO: 170 - RNA, 21 nt, Artificial Sequence
  Description of Artificial Sequence: Synthetic oligonucleotide
guaccucuucauccagacagu

SEQ ID NO: 171 - RNA, 21 nt, Artificial Sequence
  Description of Artificial Sequence: Synthetic oligonucleotide
guauaacucuaagaucugauu

SEQ ID NO: 172 - RNA, 21 nt, Artificial Sequence
  Description of Artificial Sequence: Synthetic oligonucleotide
guccucuaagaagaauaucua

SEQ ID NO: 173 - RNA, 21 nt, Artificial Sequence
  Description of Artificial Sequence: Synthetic oligonucleotide
gugacccuucagaacgaaagu

SEQ ID NO: 174 - RNA, 21 nt, Artificial Sequence
  Description of Artificial Sequence: Synthetic oligonucleotide
gugagugacaacguacccuua

SEQ ID NO: 175 - RNA, 21 nt, Artificial Sequence
  Description of Artificial Sequence: Synthetic oligonucleotide
gugcuaaaguuucccaucuuu

SEQ ID NO: 176 - RNA, 21 nt, Artificial Sequence
  Description of Artificial Sequence: Synthetic oligonucleotide
gugggagaaguucggccuaga

SEQ ID NO: 177 - RNA, 21 nt, Artificial Sequence
  Description of Artificial Sequence: Synthetic oligonucleotide
uaacucuaagaucugaugaau

SEQ ID NO: 178 - RNA, 21 nt, Artificial Sequence
  Description of Artificial Sequence: Synthetic oligonucleotide
uacaugaucuucuuugucgua

SEQ ID NO: 179 - RNA, 21 nt, Artificial Sequence
  Description of Artificial Sequence: Synthetic oligonucleotide
uaccuguugaauuuuguauua

SEQ ID NO: 180 - RNA, 21 nt, Artificial Sequence
  Description of Artificial Sequence: Synthetic oligonucleotide
uacgugcugcccaguuucgaa

SEQ ID NO: 181 - RNA, 21 nt, Artificial Sequence
  Description of Artificial Sequence: Synthetic oligonucleotide
uaggauaaugucuuauguaau

SEQ ID NO: 182 - RNA, 21 nt, Artificial Sequence
  Description of Artificial Sequence: Synthetic oligonucleotide
uaugccaaaauccuuuuuaua

SEQ ID NO: 183 - RNA, 21 nt, Artificial Sequence
  Description of Artificial Sequence: Synthetic oligonucleotide
uaugugaaacaaaccuuacga

SEQ ID NO: 184 - RNA, 21 nt, Artificial Sequence
  Description of Artificial Sequence: Synthetic oligonucleotide
uauuguaauuucaggaugcga

SEQ ID NO: 185 - RNA, 21 nt, Artificial Sequence
  Description of Artificial Sequence: Synthetic oligonucleotide
ucaaugcuucaaugucccagu

SEQ ID NO: 186 - RNA, 21 nt, Artificial Sequence
  Description of Artificial Sequence: Synthetic oligonucleotide
ucacuugaggaggcgagucua

SEQ ID NO: 187 - RNA, 21 nt, Artificial Sequence
  Description of Artificial Sequence: Synthetic oligonucleotide
ucagaacgaaaguuauaugga

SEQ ID NO: 188 - RNA, 21 nt, Artificial Sequence
  Description of Artificial Sequence: Synthetic oligonucleotide
ucaggaugcgaugucuaugca

SEQ ID NO: 189 - RNA, 21 nt, Artificial Sequence
  Description of Artificial Sequence: Synthetic oligonucleotide
uccauagaucuggaucuggca

SEQ ID NO: 190 - RNA, 21 nt, Artificial Sequence
  Description of Artificial Sequence: Synthetic oligonucleotide
uccauugucuugacaucuuau

SEQ ID NO: 191 - RNA, 21 nt, Artificial Sequence
  Description of Artificial Sequence: Synthetic oligonucleotide
uccucuaagaagaauaucuau

SEQ ID NO: 192 - RNA, 21 nt, Artificial Sequence
  Description of Artificial Sequence: Synthetic oligonucleotide
uccugcaagucaaguuccaaa

SEQ ID NO: 193 - RNA, 21 nt, Artificial Sequence
  Description of Artificial Sequence: Synthetic oligonucleotide
ucugagcugaguugguuuuau

SEQ ID NO: 194 - RNA, 21 nt, Artificial Sequence
  Description of Artificial Sequence: Synthetic oligonucleotide
ugacccuucagaacgaaaguu

SEQ ID NO: 195 - RNA, 21 nt, Artificial Sequence
  Description of Artificial Sequence: Synthetic oligonucleotide
ugagugaagaaaugaaagaca

SEQ ID NO: 196 - RNA, 21 nt, Artificial Sequence
  Description of Artificial Sequence: Synthetic oligonucleotide
ugauaguuaccuaguuugcaa

SEQ ID NO: 197 - RNA, 21 nt, Artificial Sequence
  Description of Artificial Sequence: Synthetic oligonucleotide
ugcagacaagaucuucacuua

SEQ ID NO: 198 - RNA, 21 nt, Artificial Sequence
  Description of Artificial Sequence: Synthetic oligonucleotide
ugccaaaacaaccaucaccgu

SEQ ID NO: 199 - RNA, 21 nt, Artificial Sequence
  Description of Artificial Sequence: Synthetic oligonucleotide
ugcgaucagaagagaccaagu

SEQ ID NO: 200 - RNA, 21 nt, Artificial Sequence
  Description of Artificial Sequence: Synthetic oligonucleotide
ugcuaaggccaaagaucaacu

SEQ ID NO: 201 - RNA, 21 nt, Artificial Sequence
  Description of Artificial Sequence: Synthetic oligonucleotide
ugcucuccauauuggauaaaa

SEQ ID NO: 202 - RNA, 21 nt, Artificial Sequence
  Description of Artificial Sequence: Synthetic oligonucleotide
ugcucuccuuugugguuucau

SEQ ID NO: 203 - RNA, 21 nt, Artificial Sequence
  Description of Artificial Sequence: Synthetic oligonucleotide
uggacuauguguacaagaccu

SEQ ID NO: 204 - RNA, 21 nt, Artificial Sequence
  Description of Artificial Sequence: Synthetic oligonucleotide
uggaggagaagaaaagugauu

SEQ ID NO: 205 - RNA, 21 nt, Artificial Sequence
  Description of Artificial Sequence: Synthetic oligonucleotide
uggauacaugagcaagauuua

SEQ ID NO: 206 - RNA, 21 nt, Artificial Sequence
  Description of Artificial Sequence: Synthetic oligonucleotide
ugggagagauaugccuucgaa

SEQ ID NO: 207 - RNA, 21 nt, Artificial Sequence
  Description of Artificial Sequence: Synthetic oligonucleotide
ugggcaacuccaacaauuacu

SEQ ID NO: 208 - RNA, 21 nt, Artificial Sequence
  Description of Artificial Sequence: Synthetic oligonucleotide
ugggucauucuucacuuugaa

SEQ ID NO: 209 - RNA, 21 nt, Artificial Sequence
  Description of Artificial Sequence: Synthetic oligonucleotide
uggucuuuacuggaaucuuuu

SEQ ID NO: 210 - RNA, 21 nt, Artificial Sequence
  Description of Artificial Sequence: Synthetic oligonucleotide
uggugacauggcuuccagaua

SEQ ID NO: 211 - RNA, 21 nt, Artificial Sequence
  Description of Artificial Sequence: Synthetic oligonucleotide
uggugucaucauagauaauuu

SEQ ID NO: 212 - RNA, 21 nt, Artificial Sequence
  Description of Artificial Sequence: Synthetic oligonucleotide
uggugucucaaugcuucaaua

SEQ ID NO: 213 - RNA, 21 nt, Artificial Sequence
  Description of Artificial Sequence: Synthetic oligonucleotide
uguacaagacccgacugguca

SEQ ID NO: 214 - RNA, 21 nt, Artificial Sequence
  Description of Artificial Sequence: Synthetic oligonucleotide
uguaggagaauucacuuuuca

SEQ ID NO: 215 - RNA, 21 nt, Artificial Sequence
  Description of Artificial Sequence: Synthetic oligonucleotide
uguaggagaauucacuuuucu

SEQ ID NO: 216 - RNA, 21 nt, Artificial Sequence
  Description of Artificial Sequence: Synthetic oligonucleotide
ugucgaguacacuuuuacuga

SEQ ID NO: 217 - RNA, 21 nt, Artificial Sequence
  Description of Artificial Sequence: Synthetic oligonucleotide
uguucgugcugaauaagaagu

SEQ ID NO: 218 - RNA, 21 nt, Artificial Sequence
  Description of Artificial Sequence: Synthetic oligonucleotide
uguucugucugaguguguuua

SEQ ID NO: 219 - RNA, 21 nt, Artificial Sequence
  Description of Artificial Sequence: Synthetic oligonucleotide
uguuuaaaacccaauaucuau

SEQ ID NO: 220 - RNA, 21 nt, Artificial Sequence
  Description of Artificial Sequence: Synthetic oligonucleotide
uuaaaacugugaauaaaugga

SEQ ID NO: 221 - RNA, 21 nt, Artificial Sequence
  Description of Artificial Sequence: Synthetic oligonucleotide
uuaccuaucucugcuucaagu

SEQ ID NO: 222 - RNA, 21 nt, Artificial Sequence
  Description of Artificial Sequence: Synthetic oligonucleotide
uuaccuguugaauuuuguauu

SEQ ID NO: 223 - RNA, 21 nt, Artificial Sequence
  Description of Artificial Sequence: Synthetic oligonucleotide
uuauguaaugcugcccuguaa

SEQ ID NO: 224 - RNA, 21 nt, Artificial Sequence
  Description of Artificial Sequence: Synthetic oligonucleotide
uuccucaaggaaaaagauaaa

SEQ ID NO: 225 - RNA, 21 nt, Artificial Sequence
  Description of Artificial Sequence: Synthetic oligonucleotide
uucgugcugaauaagaagaau

SEQ ID NO: 226 - RNA, 21 nt, Artificial Sequence
  Description of Artificial Sequence: Synthetic oligonucleotide
uugccauuuuguccuuugauu

SEQ ID NO: 227 - RNA, 21 nt, Artificial Sequence
  Description of Artificial Sequence: Synthetic oligonucleotide
uugcuacccauuaggauaaua

SEQ ID NO: 228 - RNA, 21 nt, Artificial Sequence
  Description of Artificial Sequence: Synthetic oligonucleotide
uugguuuuaugaaaagcuaga

SEQ ID NO: 229 - RNA, 21 nt, Artificial Sequence
  Description of Artificial Sequence: Synthetic oligonucleotide
uuguaauuucaggaugcgaua

SEQ ID NO: 230 - RNA, 21 nt, Artificial Sequence
  Description of Artificial Sequence: Synthetic oligonucleotide
uuguuccagaugcauuuuaau

SEQ ID NO: 231 - RNA, 21 nt, Artificial Sequence
  Description of Artificial Sequence: Synthetic oligonucleotide
uuuaguacacuccuuauucau

SEQ ID NO: 232 - RNA, 21 nt, Artificial Sequence
  Description of Artificial Sequence: Synthetic oligonucleotide
uuuaucaucuuugggucauua

SEQ ID NO: 233 - RNA, 21 nt, Artificial Sequence
  Description of Artificial Sequence: Synthetic oligonucleotide
uuuccauagaucuggaucuga

SEQ ID NO: 234 - RNA, 21 nt, Artificial Sequence
  Description of Artificial Sequence: Synthetic oligonucleotide
uuuguagaucuugcaauuaca

SEQ ID NO: 235 - RNA, 21 nt, Artificial Sequence
  Description of Artificial Sequence: Synthetic oligonucleotide
uuuuagaacaccuuuuucacu

SEQ ID NO: 236 - RNA, 21 nt, Artificial Sequence
  Description of Artificial Sequence: Synthetic oligonucleotide
uuuuucaccuaacuaaaauaa

SEQ ID NO: 237 - RNA, 23 nt, Artificial Sequence
  Description of Artificial Sequence: Synthetic oligonucleotide
uucauuuuugagaacauuuuuaa

SEQ ID NO: 238 - RNA, 23 nt, Artificial Sequence
  Description of Artificial Sequence: Synthetic oligonucleotide
ugcccaaagaguggugauuuucc

SEQ ID NO: 239 - RNA, 23 nt, Artificial Sequence
  Description of Artificial Sequence: Synthetic oligonucleotide
uuacacagggucucccacuuuga

SEQ ID NO: 240 - RNA, 23 nt, Artificial Sequence
  Description of Artificial Sequence: Synthetic oligonucleotide
auccaccuuugucuuucauuucu

SEQ ID NO: 241 - RNA, 23 nt, Artificial Sequence
  Description of Artificial Sequence: Synthetic oligonucleotide
uugacugugaaacccucauuuuc

SEQ ID NO: 242 - RNA, 23 nt, Artificial Sequence
  Description of Artificial Sequence: Synthetic oligonucleotide
uauccuaauggguagcaaguugc

SEQ ID NO: 243 - RNA, 23 nt, Artificial Sequence
  Description of Artificial Sequence: Synthetic oligonucleotide
acugcccaaagaguggugauuuu

SEQ ID NO: 244 - RNA, 23 nt, Artificial Sequence
  Description of Artificial Sequence: Synthetic oligonucleotide
ugaucuuccacuggcccauguug

SEQ ID NO: 245 - RNA, 23 nt, Artificial Sequence
  Description of Artificial Sequence: Synthetic oligonucleotide
uaucaagguucaguuccuggugg

SEQ ID NO: 246 - RNA, 23 nt, Artificial Sequence
  Description of Artificial Sequence: Synthetic oligonucleotide
uagacauaguggcauccuggucu

SEQ ID NO: 247 - RNA, 23 nt, Artificial Sequence
  Description of Artificial Sequence: Synthetic oligonucleotide
uaaacauuauuuuaguuagguga

SEQ ID NO: 248 - RNA, 23 nt, Artificial Sequence
  Description of Artificial Sequence: Synthetic oligonucleotide
uaaaucaggaccaggcgagguuc

SEQ ID NO: 249 - RNA, 23 nt, Artificial Sequence
  Description of Artificial Sequence: Synthetic oligonucleotide
auaauacaaaauucaacagguaa

SEQ ID NO: 250 - RNA, 23 nt, Artificial Sequence
  Description of Artificial Sequence: Synthetic oligonucleotide
aucucuguagguucauguaguug

SEQ ID NO: 251 - RNA, 23 nt, Artificial Sequence
  Description of Artificial Sequence: Synthetic oligonucleotide
aagaacuauuccauaaucaguua

SEQ ID NO: 252 - RNA, 23 nt, Artificial Sequence
  Description of Artificial Sequence: Synthetic oligonucleotide
aauagauguaguagaauuucucu

SEQ ID NO: 253 - RNA, 23 nt, Artificial Sequence
  Description of Artificial Sequence: Synthetic oligonucleotide
ugaguuuucagaauccugucuug

SEQ ID NO: 254 - RNA, 23 nt, Artificial Sequence
  Description of Artificial Sequence: Synthetic oligonucleotide
ugaugaagagguacccgcucugc

SEQ ID NO: 255 - RNA, 23 nt, Artificial Sequence
  Description of Artificial Sequence: Synthetic oligonucleotide
uaggaaauugugaccuuugcuca

SEQ ID NO: 256 - RNA, 23 nt, Artificial Sequence
  Description of Artificial Sequence: Synthetic oligonucleotide
uauuucgaaaacauuuaugcuuc

SEQ ID NO: 257 - RNA, 23 nt, Artificial Sequence
  Description of Artificial Sequence: Synthetic oligonucleotide
acauucuaagaaccucaugcugg

SEQ ID NO: 258 - RNA, 23 nt, Artificial Sequence
  Description of Artificial Sequence: Synthetic oligonucleotide
acaggcgaaagguugcuuccuag

SEQ ID NO: 259 - RNA, 23 nt, Artificial Sequence
  Description of Artificial Sequence: Synthetic oligonucleotide
uugaguaagcaaucugguccuug

SEQ ID NO: 260 - RNA, 23 nt, Artificial Sequence
  Description of Artificial Sequence: Synthetic oligonucleotide
uugaaucacuuuucuucuccucc

SEQ ID NO: 261 - RNA, 23 nt, Artificial Sequence
  Description of Artificial Sequence: Synthetic oligonucleotide
uauuuugccaacuugaagacucg

SEQ ID NO: 262 - RNA, 23 nt, Artificial Sequence
  Description of Artificial Sequence: Synthetic oligonucleotide
aucuuguacacauaguccacucc

SEQ ID NO: 263 - RNA, 23 nt, Artificial Sequence
  Description of Artificial Sequence: Synthetic oligonucleotide
uucugaaaggagauaggaacuac

SEQ ID NO: 264 - RNA, 23 nt, Artificial Sequence
  Description of Artificial Sequence: Synthetic oligonucleotide
aagcauuacauaagacauuaucc

SEQ ID NO: 265 - RNA, 23 nt, Artificial Sequence
  Description of Artificial Sequence: Synthetic oligonucleotide
uugcaaaucuugcucauguaucc

SEQ ID NO: 266 - RNA, 23 nt, Artificial Sequence
  Description of Artificial Sequence: Synthetic oligonucleotide
uauguuucccuccugguugauca

SEQ ID NO: 267 - RNA, 23 nt, Artificial Sequence
  Description of Artificial Sequence: Synthetic oligonucleotide
aaagaaugacccaaagaugauaa

SEQ ID NO: 268 - RNA, 23 nt, Artificial Sequence
  Description of Artificial Sequence: Synthetic oligonucleotide
aaaaaauauacuucaucagaucu

SEQ ID NO: 269 - RNA, 23 nt, Artificial Sequence
  Description of Artificial Sequence: Synthetic oligonucleotide
aaucacuacgacaaagaagauca

SEQ ID NO: 270 - RNA, 23 nt, Artificial Sequence
  Description of Artificial Sequence: Synthetic oligonucleotide
uuuucgacaauuucucagcaucu

SEQ ID NO: 271 - RNA, 23 nt, Artificial Sequence
  Description of Artificial Sequence: Synthetic oligonucleotide
aaugcaucuggaacaagccauca

SEQ ID NO: 272 - RNA, 23 nt, Artificial Sequence
  Description of Artificial Sequence: Synthetic oligonucleotide
uuuggccuuagcaugguacauug

SEQ ID NO: 273 - RNA, 23 nt, Artificial Sequence
  Description of Artificial Sequence: Synthetic oligonucleotide
aaguaaaaguguacucgacauuu

SEQ ID NO: 274 - RNA, 23 nt, Artificial Sequence
  Description of Artificial Sequence: Synthetic oligonucleotide
uaaggcuuauucuacuaacaucu

SEQ ID NO: 275 - RNA, 23 nt, Artificial Sequence
  Description of Artificial Sequence: Synthetic oligonucleotide
uacauaagacauuauccuaaugg

SEQ ID NO: 276 - RNA, 23 nt, Artificial Sequence
  Description of Artificial Sequence: Synthetic oligonucleotide
ucaucugugaacgaagagaaucc

SEQ ID NO: 277 - RNA, 23 nt, Artificial Sequence
  Description of Artificial Sequence: Synthetic oligonucleotide
aacaccaugcuucaaguguuguc

SEQ ID NO: 278 - RNA, 23 nt, Artificial Sequence
  Description of Artificial Sequence: Synthetic oligonucleotide
uguagcaaguugcaaaucuugcu

SEQ ID NO: 279 - RNA, 23 nt, Artificial Sequence
  Description of Artificial Sequence: Synthetic oligonucleotide
auguaauaggcguagaccuugac

SEQ ID NO: 280 - RNA, 23 nt, Artificial Sequence
  Description of Artificial Sequence: Synthetic oligonucleotide
uccagguagaugaugaggguguu

SEQ ID NO: 281 - RNA, 23 nt, Artificial Sequence
  Description of Artificial Sequence: Synthetic oligonucleotide
agauucccaguggauacgguggg

SEQ ID NO: 282 - RNA, 23 nt, Artificial Sequence
  Description of Artificial Sequence: Synthetic oligonucleotide
uuuaguuaggugaaaaagguguu

SEQ ID NO: 283 - RNA, 23 nt, Artificial Sequence
  Description of Artificial Sequence: Synthetic oligonucleotide
auuaguuaggugaaaaagguguu

SEQ ID NO: 284 - RNA, 23 nt, Artificial Sequence
  Description of Artificial Sequence: Synthetic oligonucleotide
aaacacaaucaggaaggagugga

SEQ ID NO: 285 - RNA, 23 nt, Artificial Sequence
  Description of Artificial Sequence: Synthetic oligonucleotide
uuccauauaacuuucguucugaa

SEQ ID NO: 286 - RNA, 23 nt, Artificial Sequence
  Description of Artificial Sequence: Synthetic oligonucleotide
agauguaguagaauuucucugua

SEQ ID NO: 287 - RNA, 23 nt, Artificial Sequence
  Description of Artificial Sequence: Synthetic oligonucleotide
aaguggaagaagucguucaugug

SEQ ID NO: 288 - RNA, 23 nt, Artificial Sequence
  Description of Artificial Sequence: Synthetic oligonucleotide
aaguugcaaaucuugcucaugua

SEQ ID NO: 289 - RNA, 23 nt, Artificial Sequence
  Description of Artificial Sequence: Synthetic oligonucleotide
ucucaguucugaaacaccaugcu

SEQ ID NO: 290 - RNA, 23 nt, Artificial Sequence
  Description of Artificial Sequence: Synthetic oligonucleotide
augccuuccggguucucaauguu

SEQ ID NO: 291 - RNA, 23 nt, Artificial Sequence
  Description of Artificial Sequence: Synthetic oligonucleotide
aguucuuaucuuuggcugugguc

SEQ ID NO: 292 - RNA, 23 nt, Artificial Sequence
  Description of Artificial Sequence: Synthetic oligonucleotide
aucuuggugaaguggaucuggua

SEQ ID NO: 293 - RNA, 23 nt, Artificial Sequence
  Description of Artificial Sequence: Synthetic oligonucleotide
aauaagacauuauccuaaugggu

SEQ ID NO: 294 - RNA, 23 nt, Artificial Sequence
  Description of Artificial Sequence: Synthetic oligonucleotide
auugagccaacgcacgacgggag

SEQ ID NO: 295 - RNA, 23 nt, Artificial Sequence
  Description of Artificial Sequence: Synthetic oligonucleotide
acaaucugguccuugggucggaa

SEQ ID NO: 296 - RNA, 23 nt, Artificial Sequence
  Description of Artificial Sequence: Synthetic oligonucleotide
aaauuguagagaacggcucggau

SEQ ID NO: 297 - RNA, 23 nt, Artificial Sequence
  Description of Artificial Sequence: Synthetic oligonucleotide
auaauauuccaggacauacgguu

SEQ ID NO: 298 - RNA, 23 nt, Artificial Sequence
  Description of Artificial Sequence: Synthetic oligonucleotide
uuaaacauuauuuuaguuaggug

SEQ ID NO: 299 - RNA, 23 nt, Artificial Sequence
  Description of Artificial Sequence: Synthetic oligonucleotide
ucugguucugagaagacaaggag

SEQ ID NO: 300 - RNA, 23 nt, Artificial Sequence
  Description of Artificial Sequence: Synthetic oligonucleotide
uugacuuuagggcagaugucgua

SEQ ID NO: 301 - RNA, 23 nt, Artificial Sequence
  Description of Artificial Sequence: Synthetic oligonucleotide
aguucauugagccaacgcacgac

SEQ ID NO: 302 - RNA, 23 nt, Artificial Sequence
  Description of Artificial Sequence: Synthetic oligonucleotide
ucgaacaacagaguaggguagcc

SEQ ID NO: 303 - RNA, 23 nt, Artificial Sequence
  Description of Artificial Sequence: Synthetic oligonucleotide
aaagucuuuuagcugcaguaggg

SEQ ID NO: 304 - RNA, 23 nt, Artificial Sequence
  Description of Artificial Sequence: Synthetic oligonucleotide
uuucucacuggacagcacuaguu

SEQ ID NO: 305 - RNA, 23 nt, Artificial Sequence
  Description of Artificial Sequence: Synthetic oligonucleotide
uaacagucugaccauuaauaggg

SEQ ID NO: 306 - RNA, 23 nt, Artificial Sequence
  Description of Artificial Sequence: Synthetic oligonucleotide
uuuguuacccccgccauggagac

SEQ ID NO: 307 - RNA, 23 nt, Artificial Sequence
  Description of Artificial Sequence: Synthetic oligonucleotide
auuuucauaaaaccaacucagcu

SEQ ID NO: 308 - RNA, 23 nt, Artificial Sequence
  Description of Artificial Sequence: Synthetic oligonucleotide
uauuaucaguauuuugggcagca

SEQ ID NO: 309 - RNA, 23 nt, Artificial Sequence
  Description of Artificial Sequence: Synthetic oligonucleotide
ugcuuaccaggguccucccagcg

SEQ ID NO: 310 - RNA, 23 nt, Artificial Sequence
  Description of Artificial Sequence: Synthetic oligonucleotide
uacuuuucuucuccuccacagaa

SEQ ID NO: 311 - RNA, 23 nt, Artificial Sequence
  Description of Artificial Sequence: Synthetic oligonucleotide
uuccacgucaccaauaagaagcu

SEQ ID NO: 312 - RNA, 23 nt, Artificial Sequence
  Description of Artificial Sequence: Synthetic oligonucleotide
uuaaaaugcaucuggaacaagcc

SEQ ID NO: 313 - RNA, 23 nt, Artificial Sequence
  Description of Artificial Sequence: Synthetic oligonucleotide
aggaaaaucacuacgacaaagaa

SEQ ID NO: 314 - RNA, 23 nt, Artificial Sequence
  Description of Artificial Sequence: Synthetic oligonucleotide
auguagauggucuugucugucug

SEQ ID NO: 315 - RNA, 23 nt, Artificial Sequence
  Description of Artificial Sequence: Synthetic oligonucleotide
auagauguaguagaauuucucug

SEQ ID NO: 316 - RNA, 23 nt, Artificial Sequence
  Description of Artificial Sequence: Synthetic oligonucleotide
auggcauuguuucugguucucuu

SEQ ID NO: 317 - RNA, 23 nt, Artificial Sequence
  Description of Artificial Sequence: Synthetic oligonucleotide
ucauaaagaugucuugaccucca

SEQ ID NO: 318 - RNA, 23 nt, Artificial Sequence
  Description of Artificial Sequence: Synthetic oligonucleotide
agaacuggagaaggagcacuccg

SEQ ID NO: 319 - RNA, 23 nt, Artificial Sequence
  Description of Artificial Sequence: Synthetic oligonucleotide
auggguagcaaguugcaaaucuu

SEQ ID NO: 320 - RNA, 23 nt, Artificial Sequence
  Description of Artificial Sequence: Synthetic oligonucleotide
uaagguagagguucccugugcag

SEQ ID NO: 321 - RNA, 23 nt, Artificial Sequence
  Description of Artificial Sequence: Synthetic oligonucleotide
aucccgcugcgcucugccugcac

SEQ ID NO: 322 - RNA, 23 nt, Artificial Sequence
  Description of Artificial Sequence: Synthetic oligonucleotide
ucauuagcugaggggaauggcaa

SEQ ID NO: 323 - RNA, 23 nt, Artificial Sequence
  Description of Artificial Sequence: Synthetic oligonucleotide
agaaauuuguuaagaagaggccc

SEQ ID NO: 324 - RNA, 23 nt, Artificial Sequence
  Description of Artificial Sequence: Synthetic oligonucleotide
aggagauaggaacuacaacgccu

SEQ ID NO: 325 - RNA, 23 nt, Artificial Sequence
  Description of Artificial Sequence: Synthetic oligonucleotide
agaauagugcacaugaugagcau

SEQ ID NO: 326 - RNA, 23 nt, Artificial Sequence
  Description of Artificial Sequence: Synthetic oligonucleotide
aaugaagcaauucuccucagcac

SEQ ID NO: 327 - RNA, 23 nt, Artificial Sequence
  Description of Artificial Sequence: Synthetic oligonucleotide
uuuucauaaaaccaacucagcuc

SEQ ID NO: 328 - RNA, 23 nt, Artificial Sequence
  Description of Artificial Sequence: Synthetic oligonucleotide
auccaaugcugucugagaagcag

SEQ ID NO: 329 - RNA, 23 nt, Artificial Sequence
  Description of Artificial Sequence: Synthetic oligonucleotide
ucugaguaagcaaucugguccuu

SEQ ID NO: 330 - RNA, 23 nt, Artificial Sequence
  Description of Artificial Sequence: Synthetic oligonucleotide
uuccggcucagcacaaccucccc

SEQ ID NO: 331 - RNA, 23 nt, Artificial Sequence
  Description of Artificial Sequence: Synthetic oligonucleotide
ugaagaagucguucaugugccac

SEQ ID NO: 332 - RNA, 23 nt, Artificial Sequence
  Description of Artificial Sequence: Synthetic oligonucleotide
uaaggaaggagggauaaggccac

SEQ ID NO: 333 - RNA, 23 nt, Artificial Sequence
  Description of Artificial Sequence: Synthetic oligonucleotide
aaacaauuaggaaauccagccaa

SEQ ID NO: 334 - RNA, 23 nt, Artificial Sequence
  Description of Artificial Sequence: Synthetic oligonucleotide
uaaacggaagauuguuuucccuu

SEQ ID NO: 335 - RNA, 23 nt, Artificial Sequence
  Description of Artificial Sequence: Synthetic oligonucleotide
agauuaucaucuuguuacccccg

SEQ ID NO: 336 - RNA, 23 nt, Artificial Sequence
  Description of Artificial Sequence: Synthetic oligonucleotide
acauugaagcauugagacaccag

SEQ ID NO: 337 - RNA, 23 nt, Artificial Sequence
  Description of Artificial Sequence: Synthetic oligonucleotide
aaugaagaaguccugcauuacug

SEQ ID NO: 338 - RNA, 23 nt, Artificial Sequence
  Description of Artificial Sequence: Synthetic oligonucleotide
acugucuggaugaagagguaccc

SEQ ID NO: 339 - RNA, 23 nt, Artificial Sequence
  Description of Artificial Sequence: Synthetic oligonucleotide
aaucagaucuuagaguuauacaa

SEQ ID NO: 340 - RNA, 23 nt, Artificial Sequence
  Description of Artificial Sequence: Synthetic oligonucleotide
uagauauucuucuuagaggacug

SEQ ID NO: 341 - RNA, 23 nt, Artificial Sequence
  Description of Artificial Sequence: Synthetic oligonucleotide
acuuucguucugaagggucacac

SEQ ID NO: 342 - RNA, 23 nt, Artificial Sequence
  Description of Artificial Sequence: Synthetic oligonucleotide
uaaggguacguugucacucacuc

SEQ ID NO: 343 - RNA, 23 nt, Artificial Sequence
  Description of Artificial Sequence: Synthetic oligonucleotide
aaagaugggaaacuuuagcaccu

SEQ ID NO: 344 - RNA, 23 nt, Artificial Sequence
  Description of Artificial Sequence: Synthetic oligonucleotide
ucuaggccgaacuucucccacug

SEQ ID NO: 345 - RNA, 23 nt, Artificial Sequence
  Description of Artificial Sequence: Synthetic oligonucleotide
auucaucagaucuuagaguuaua

SEQ ID NO: 346 - RNA, 23 nt, Artificial Sequence
  Description of Artificial Sequence: Synthetic oligonucleotide
uacgacaaagaagaucauguagg

SEQ ID NO: 347 - RNA, 23 nt, Artificial Sequence
  Description of Artificial Sequence: Synthetic oligonucleotide
uaauacaaaauucaacagguaac

SEQ ID NO: 348 - RNA, 23 nt, Artificial Sequence
  Description of Artificial Sequence: Synthetic oligonucleotide
uucgaaacugggcagcacguacu

SEQ ID NO: 349 - RNA, 23 nt, Artificial Sequence
  Description of Artificial Sequence: Synthetic oligonucleotide
auuacauaagacauuauccuaau

SEQ ID NO: 350 - RNA, 23 nt, Artificial Sequence
  Description of Artificial Sequence: Synthetic oligonucleotide
uauaaaaaggauuuuggcauaga

SEQ ID NO: 351 - RNA, 23 nt, Artificial Sequence
  Description of Artificial Sequence: Synthetic oligonucleotide
ucguaagguuuguuucacauaau

SEQ ID NO: 352 - RNA, 23 nt, Artificial Sequence
  Description of Artificial Sequence: Synthetic oligonucleotide
ucgcauccugaaauuacaauauu

SEQ ID NO: 353 - RNA, 23 nt, Artificial Sequence
  Description of Artificial Sequence: Synthetic oligonucleotide
acugggacauugaagcauugaga

SEQ ID NO: 354 - RNA, 23 nt, Artificial Sequence
  Description of Artificial Sequence: Synthetic oligonucleotide
uagacucgccuccucaagugacu

SEQ ID NO: 355 - RNA, 23 nt, Artificial Sequence
  Description of Artificial Sequence: Synthetic oligonucleotide
uccauauaacuuucguucugaag

SEQ ID NO: 356 - RNA, 23 nt, Artificial Sequence
  Description of Artificial Sequence: Synthetic oligonucleotide
ugcauagacaucgcauccugaaa

SEQ ID NO: 357 - RNA, 23 nt, Artificial Sequence
  Description of Artificial Sequence: Synthetic oligonucleotide
ugccagauccagaucuauggaaa

SEQ ID NO: 358 - RNA, 23 nt, Artificial Sequence
  Description of Artificial Sequence: Synthetic oligonucleotide
auaagaugucaagacaauggauc

SEQ ID NO: 359 - RNA, 23 nt, Artificial Sequence
  Description of Artificial Sequence: Synthetic oligonucleotide
auagauauucuucuuagaggacu

SEQ ID NO: 360 - RNA, 23 nt, Artificial Sequence
  Description of Artificial Sequence: Synthetic oligonucleotide
uuuggaacuugacuugcaggaaa

SEQ ID NO: 361 - RNA, 23 nt, Artificial Sequence
  Description of Artificial Sequence: Synthetic oligonucleotide
auaaaaccaacucagcucagagg

SEQ ID NO: 362 - RNA, 23 nt, Artificial Sequence
  Description of Artificial Sequence: Synthetic oligonucleotide
aacuuucguucugaagggucaca

SEQ ID NO: 363 - RNA, 23 nt, Artificial Sequence
  Description of Artificial Sequence: Synthetic oligonucleotide
ugucuuucauuucuucacucagu

SEQ ID NO: 364 - RNA, 23 nt, Artificial Sequence
  Description of Artificial Sequence: Synthetic oligonucleotide
uugcaaacuagguaacuaucaaa

SEQ ID NO: 365 - RNA, 23 nt, Artificial Sequence
  Description of Artificial Sequence: Synthetic oligonucleotide
uaagugaagaucuugucugcaua

SEQ ID NO: 366 - RNA, 23 nt, Artificial Sequence
  Description of Artificial Sequence: Synthetic oligonucleotide
acggugaugguuguuuuggcauc

SEQ ID NO: 367 - RNA, 23 nt, Artificial Sequence
  Description of Artificial Sequence: Synthetic oligonucleotide
acuuggucucuucugaucgcagg

SEQ ID NO: 368 - RNA, 23 nt, Artificial Sequence
  Description of Artificial Sequence: Synthetic oligonucleotide
aguugaucuuuggccuuagcaug

SEQ ID NO: 369 - RNA, 23 nt, Artificial Sequence
  Description of Artificial Sequence: Synthetic oligonucleotide
uuuuauccaauauggagagcaau

SEQ ID NO: 370 - RNA, 23 nt, Artificial Sequence
  Description of Artificial Sequence: Synthetic oligonucleotide
augaaaccacaaaggagagcauc

SEQ ID NO: 371 - RNA, 23 nt, Artificial Sequence
  Description of Artificial Sequence: Synthetic oligonucleotide
aggucuuguacacauaguccacu

SEQ ID NO: 372 - RNA, 23 nt, Artificial Sequence
  Description of Artificial Sequence: Synthetic oligonucleotide
aaucacuuuucuucuccuccaca

SEQ ID NO: 373 - RNA, 23 nt, Artificial Sequence
  Description of Artificial Sequence: Synthetic oligonucleotide
uaaaucuugcucauguauccacc

SEQ ID NO: 374 - RNA, 23 nt, Artificial Sequence
  Description of Artificial Sequence: Synthetic oligonucleotide
uucgaaggcauaucucucccagc

SEQ ID NO: 375 - RNA, 23 nt, Artificial Sequence
  Description of Artificial Sequence: Synthetic oligonucleotide
aguaauuguuggaguugcccacg

SEQ ID NO: 376 - RNA, 23 nt, Artificial Sequence
  Description of Artificial Sequence: Synthetic oligonucleotide
uucaaagugaagaaugacccaaa

SEQ ID NO: 377 - RNA, 23 nt, Artificial Sequence
  Description of Artificial Sequence: Synthetic oligonucleotide
aaaagauuccaguaaagaccaaa

SEQ ID NO: 378 - RNA, 23 nt, Artificial Sequence
  Description of Artificial Sequence: Synthetic oligonucleotide
uaucuggaagccaugucaccagu

SEQ ID NO: 379 - RNA, 23 nt, Artificial Sequence
  Description of Artificial Sequence: Synthetic oligonucleotide
aaauuaucuaugaugacaccaau

SEQ ID NO: 380 - RNA, 23 nt, Artificial Sequence
  Description of Artificial Sequence: Synthetic oligonucleotide
uauugaagcauugagacaccaga

SEQ ID NO: 381 - RNA, 23 nt, Artificial Sequence
  Description of Artificial Sequence: Synthetic oligonucleotide
ugaccagucgggucuuguacaca

SEQ ID NO: 382 - RNA, 23 nt, Artificial Sequence
  Description of Artificial Sequence: Synthetic oligonucleotide
ugaaaagugaauucuccuacaca

SEQ ID NO: 383 - RNA, 23 nt, Artificial Sequence
  Description of Artificial Sequence: Synthetic oligonucleotide
agaaaagugaauucuccuacaca

SEQ ID NO: 384 - RNA, 23 nt, Artificial Sequence
  Description of Artificial Sequence: Synthetic oligonucleotide
ucaguaaaaguguacucgacauu

SEQ ID NO: 385 - RNA, 23 nt, Artificial Sequence
  Description of Artificial Sequence: Synthetic oligonucleotide
acuucuuauucagcacgaacacg

SEQ ID NO: 386 - RNA, 23 nt, Artificial Sequence
  Description of Artificial Sequence: Synthetic oligonucleotide
uaaacacacucagacagaacaca

SEQ ID NO: 387 - RNA, 23 nt, Artificial Sequence
  Description of Artificial Sequence: Synthetic oligonucleotide
auagauauuggguuuuaaacaac

SEQ ID NO: 388 - RNA, 23 nt, Artificial Sequence
  Description of Artificial Sequence: Synthetic oligonucleotide
uccauuuauucacaguuuuaaaa

SEQ ID NO: 389 - RNA, 23 nt, Artificial Sequence
  Description of Artificial Sequence: Synthetic oligonucleotide
acuugaagcagagauagguaacc

SEQ ID NO: 390 - RNA, 23 nt, Artificial Sequence
  Description of Artificial Sequence: Synthetic oligonucleotide
aauacaaaauucaacagguaaca

SEQ ID NO: 391 - RNA, 23 nt, Artificial Sequence
  Description of Artificial Sequence: Synthetic oligonucleotide
uuacagggcagcauuacauaaga

SEQ ID NO: 392 - RNA, 23 nt, Artificial Sequence
  Description of Artificial Sequence: Synthetic oligonucleotide
uuuaucuuuuuccuugaggaaau

SEQ ID NO: 393 - RNA, 23 nt, Artificial Sequence
  Description of Artificial Sequence: Synthetic oligonucleotide
auucuucuuauucagcacgaaca

SEQ ID NO: 394 - RNA, 23 nt, Artificial Sequence
  Description of Artificial Sequence: Synthetic oligonucleotide
aaucaaaggacaaaauggcaaua

SEQ ID NO: 395 - RNA, 23 nt, Artificial Sequence
  Description of Artificial Sequence: Synthetic oligonucleotide
uauuauccuaauggguagcaagu

SEQ ID NO: 396 - RNA, 23 nt, Artificial Sequence
  Description of Artificial Sequence: Synthetic oligonucleotide
ucuagcuuuucauaaaaccaacu

SEQ ID NO: 397 - RNA, 23 nt, Artificial Sequence
  Description of Artificial Sequence: Synthetic oligonucleotide
uaucgcauccugaaauuacaaua

SEQ ID NO: 398 - RNA, 23 nt, Artificial Sequence
  Description of Artificial Sequence: Synthetic oligonucleotide
auuaaaaugcaucuggaacaagc

SEQ ID NO: 399 - RNA, 23 nt, Artificial Sequence
  Description of Artificial Sequence: Synthetic oligonucleotide
augaauaaggaguguacuaaaau

SEQ ID NO: 400 - RNA, 23 nt, Artificial Sequence
  Description of Artificial Sequence: Synthetic oligonucleotide
uaaugacccaaagaugauaaaga

SEQ ID NO: 401 - RNA, 23 nt, Artificial Sequence
  Description of Artificial Sequence: Synthetic oligonucleotide
ucagauccagaucuauggaaaau

SEQ ID NO: 402 - RNA, 23 nt, Artificial Sequence
  Description of Artificial Sequence: Synthetic oligonucleotide
uguaauugcaagaucuacaaaag

SEQ ID NO: 403 - RNA, 23 nt, Artificial Sequence
  Description of Artificial Sequence: Synthetic oligonucleotide
agugaaaaagguguucuaaaauu

SEQ ID NO: 404 - RNA, 23 nt, Artificial Sequence
  Description of Artificial Sequence: Synthetic oligonucleotide
uuauuuuaguuaggugaaaaagg

SEQ ID NO: 405 - RNA, 21 nt, Artificial Sequence
  Description of Artificial Sequence: Synthetic oligonucleotide
agccugagggccaccauccuu

SEQ ID NO: 406 - RNA, 21 nt, Artificial Sequence
  Description of Artificial Sequence: Synthetic oligonucleotide
ccugagggccaccauccucuu

SEQ ID NO: 407 - RNA, 21 nt, Artificial Sequence
  Description of Artificial Sequence: Synthetic oligonucleotide
agggccaccauccucugccuu

SEQ ID NO: 408 - RNA, 21 nt, Artificial Sequence
  Description of Artificial Sequence: Synthetic oligonucleotide
gugaccggguguacauacacu

SEQ ID NO: 409 - RNA, 21 nt, Artificial Sequence
  Description of Artificial Sequence: Synthetic oligonucleotide
ccggguguacauacaccccuu

SEQ ID NO: 410 - RNA, 21 nt, Artificial Sequence
  Description of Artificial Sequence: Synthetic oligonucleotide
cggguguacauacaccccuuu

SEQ ID NO: 411 - RNA, 21 nt, Artificial Sequence
  Description of Artificial Sequence: Synthetic oligonucleotide
ggguguacauacaccccuucu

SEQ ID NO: 412 - RNA, 21 nt, Artificial Sequence
  Description of Artificial Sequence: Synthetic oligonucleotide
gguguacauacaccccuuccu

SEQ ID NO: 413 - RNA, 21 nt, Artificial Sequence
  Description of Artificial Sequence: Synthetic oligonucleotide
guguacauacaccccuuccau

SEQ ID NO: 414 - RNA, 21 nt, Artificial Sequence
  Description of Artificial Sequence: Synthetic oligonucleotide
uguacauacaccccuuccacu

SEQ ID NO: 415 - RNA, 21 nt, Artificial Sequence
  Description of Artificial Sequence: Synthetic oligonucleotide
guacauacaccccuuccaccu

SEQ ID NO: 416 - RNA, 21 nt, Artificial Sequence
  Description of Artificial Sequence: Synthetic oligonucleotide
uacauacaccccuuccaccuu

SEQ ID NO: 417 - RNA, 21 nt, Artificial Sequence
  Description of Artificial Sequence: Synthetic oligonucleotide
acauacaccccuuccaccucu

SEQ ID NO: 418 - RNA, 21 nt, Artificial Sequence
  Description of Artificial Sequence: Synthetic oligonucleotide
cauacaccccuuccaccucgu

SEQ ID NO: 419 - RNA, 21 nt, Artificial Sequence
  Description of Artificial Sequence: Synthetic oligonucleotide
auacaccccuuccaccucguu

SEQ ID NO: 420 - RNA, 21 nt, Artificial Sequence
  Description of Artificial Sequence: Synthetic oligonucleotide
cccuuccaccucgucauccau

SEQ ID NO: 421 - RNA, 21 nt, Artificial Sequence
  Description of Artificial Sequence: Synthetic oligonucleotide
ccuuccaccucgucauccacu

SEQ ID NO: 422 - RNA, 21 nt, Artificial Sequence
  Description of Artificial Sequence: Synthetic oligonucleotide
cuuccaccucgucauccacau

SEQ ID NO: 423 - RNA, 21 nt, Artificial Sequence
  Description of Artificial Sequence: Synthetic oligonucleotide
uuccaccucgucauccacaau

SEQ ID NO: 424 - RNA, 21 nt, Artificial Sequence
  Description of Artificial Sequence: Synthetic oligonucleotide
uccaccucgucauccacaauu

SEQ ID NO: 425 - RNA, 21 nt, Artificial Sequence
  Description of Artificial Sequence: Synthetic oligonucleotide
ccaccucgucauccacaaugu

SEQ ID NO: 426 - RNA, 21 nt, Artificial Sequence
  Description of Artificial Sequence: Synthetic oligonucleotide
caccucgucauccacaaugau

SEQ ID NO: 427 - RNA, 21 nt, Artificial Sequence
  Description of Artificial Sequence: Synthetic oligonucleotide
ccucgucauccacaaugagau

SEQ ID NO: 428 - RNA, 21 nt, Artificial Sequence
  Description of Artificial Sequence: Synthetic oligonucleotide
cucgucauccacaaugagagu

SEQ ID NO: 429 - RNA, 21 nt, Artificial Sequence
  Description of Artificial Sequence: Synthetic oligonucleotide
ucgucauccacaaugagaguu

SEQ ID NO: 430 - RNA, 21 nt, Artificial Sequence
  Description of Artificial Sequence: Synthetic oligonucleotide
cgucauccacaaugagaguau

SEQ ID NO: 431 - RNA, 21 nt, Artificial Sequence
  Description of Artificial Sequence: Synthetic oligonucleotide
gucauccacaaugagaguacu

SEQ ID NO: 432 - RNA, 21 nt, Artificial Sequence
  Description of Artificial Sequence: Synthetic oligonucleotide
ucauccacaaugagaguaccu

SEQ ID NO: 433 - RNA, 21 nt, Artificial Sequence
  Description of Artificial Sequence: Synthetic oligonucleotide
cauccacaaugagaguaccuu

SEQ ID NO: 434 - RNA, 21 nt, Artificial Sequence
  Description of Artificial Sequence: Synthetic oligonucleotide
auccacaaugagaguaccugu

SEQ ID NO: 435 - RNA, 21 nt, Artificial Sequence
  Description of Artificial Sequence: Synthetic oligonucleotide
uccacaaugagaguaccuguu

SEQ ID NO: 436 - RNA, 21 nt, Artificial Sequence
  Description of Artificial Sequence: Synthetic oligonucleotide
ccacaaugagaguaccugugu

SEQ ID NO: 437 - RNA, 21 nt, Artificial Sequence
  Description of Artificial Sequence: Synthetic oligonucleotide
cacaaugagaguaccugugau

SEQ ID NO: 438 - RNA, 21 nt, Artificial Sequence
  Description of Artificial Sequence: Synthetic oligonucleotide
acaaugagaguaccugugagu

SEQ ID NO: 439 - RNA, 21 nt, Artificial Sequence
  Description of Artificial Sequence: Synthetic oligonucleotide
caaugagaguaccugugagcu

SEQ ID NO: 440 - RNA, 21 nt, Artificial Sequence
  Description of Artificial Sequence: Synthetic oligonucleotide
aaugagaguaccugugagcau

SEQ ID NO: 441 - RNA, 21 nt, Artificial Sequence
  Description of Artificial Sequence: Synthetic oligonucleotide
augagaguaccugugagcagu

SEQ ID NO: 442 - RNA, 21 nt, Artificial Sequence
  Description of Artificial Sequence: Synthetic oligonucleotide
ugagaguaccugugagcagcu

SEQ ID NO: 443 - RNA, 21 nt, Artificial Sequence
  Description of Artificial Sequence: Synthetic oligonucleotide
gagaguaccugugagcagcuu

SEQ ID NO: 444 - RNA, 21 nt, Artificial Sequence
  Description of Artificial Sequence: Synthetic oligonucleotide
agaguaccugugagcagcugu

SEQ ID NO: 445 - RNA, 21 nt, Artificial Sequence
  Description of Artificial Sequence: Synthetic oligonucleotide
gaguaccugugagcagcuggu

SEQ ID NO: 446 - RNA, 21 nt, Artificial Sequence
  Description of Artificial Sequence: Synthetic oligonucleotide
aguaccugugagcagcuggcu

SEQ ID NO: 447 - RNA, 21 nt, Artificial Sequence
  Description of Artificial Sequence: Synthetic oligonucleotide
guaccugugagcagcuggcau

SEQ ID NO: 448 - RNA, 21 nt, Artificial Sequence
  Description of Artificial Sequence: Synthetic oligonucleotide
uaccugugagcagcuggcaau

SEQ ID NO: 449 - RNA, 21 nt, Artificial Sequence
  Description of Artificial Sequence: Synthetic oligonucleotide
aauggucgggaugcuggccau

SEQ ID NO: 450 - RNA, 21 nt, Artificial Sequence
  Description of Artificial Sequence: Synthetic oligonucleotide
auggucgggaugcuggccaau

SEQ ID NO: 451 - RNA, 21 nt, Artificial Sequence
  Description of Artificial Sequence: Synthetic oligonucleotide
uggucgggaugcuggccaacu

SEQ ID NO: 452 - RNA, 21 nt, Artificial Sequence
  Description of Artificial Sequence: Synthetic oligonucleotide
ggucgggaugcuggccaacuu

SEQ ID NO: 453 - RNA, 21 nt, Artificial Sequence
  Description of Artificial Sequence: Synthetic oligonucleotide
gucgggaugcuggccaacuuu

SEQ ID NO: 454 - RNA, 21 nt, Artificial Sequence
  Description of Artificial Sequence: Synthetic oligonucleotide
ucgggaugcuggccaacuucu

SEQ ID NO: 455 - RNA, 21 nt, Artificial Sequence
  Description of Artificial Sequence: Synthetic oligonucleotide
cgggaugcuggccaacuucuu

SEQ ID NO: 456 - RNA, 21 nt, Artificial Sequence
  Description of Artificial Sequence: Synthetic oligonucleotide
gggaugcuggccaacuucuuu

SEQ ID NO: 457 - RNA, 21 nt, Artificial Sequence
  Description of Artificial Sequence: Synthetic oligonucleotide
ggaugcuggccaacuucuugu

SEQ ID NO: 458 - RNA, 21 nt, Artificial Sequence
  Description of Artificial Sequence: Synthetic oligonucleotide
gaugcuggccaacuucuuggu

SEQ ID NO: 459 - RNA, 21 nt, Artificial Sequence
  Description of Artificial Sequence: Synthetic oligonucleotide
gcuggccaacuucuugggcuu

SEQ ID NO: 460 - RNA, 21 nt, Artificial Sequence
  Description of Artificial Sequence: Synthetic oligonucleotide
cuggccaacuucuugggcuuu

SEQ ID NO: 461 - RNA, 21 nt, Artificial Sequence
  Description of Artificial Sequence: Synthetic oligonucleotide
gccaacuucuugggcuuccgu

SEQ ID NO: 462 - RNA, 21 nt, Artificial Sequence
  Description of Artificial Sequence: Synthetic oligonucleotide
ccaacuucuugggcuuccguu

SEQ ID NO: 463 - RNA, 21 nt, Artificial Sequence
  Description of Artificial Sequence: Synthetic oligonucleotide
caacuucuugggcuuccguau

SEQ ID NO: 464 - RNA, 21 nt, Artificial Sequence
  Description of Artificial Sequence: Synthetic oligonucleotide
aacuucuugggcuuccguauu

SEQ ID NO: 465 - RNA, 21 nt, Artificial Sequence
  Description of Artificial Sequence: Synthetic oligonucleotide
acuucuugggcuuccguauau

SEQ ID NO: 466 - RNA, 21 nt, Artificial Sequence
  Description of Artificial Sequence: Synthetic oligonucleotide
cuucuugggcuuccguauauu

SEQ ID NO: 467 - RNA, 21 nt, Artificial Sequence
  Description of Artificial Sequence: Synthetic oligonucleotide
uucuugggcuuccguauauau

SEQ ID NO: 468 - RNA, 21 nt, Artificial Sequence
  Description of Artificial Sequence: Synthetic oligonucleotide
ucuugggcuuccguauauauu

SEQ ID NO: 469 - RNA, 21 nt, Artificial Sequence
  Description of Artificial Sequence: Synthetic oligonucleotide
cuugggcuuccguauauaugu

SEQ ID NO: 470 - RNA, 21 nt, Artificial Sequence
  Description of Artificial Sequence: Synthetic oligonucleotide
uugggcuuccguauauauggu

SEQ ID NO: 471 - RNA, 21 nt, Artificial Sequence
  Description of Artificial Sequence: Synthetic oligonucleotide
gggcuuccguauauauggcau

SEQ ID NO: 472 - RNA, 21 nt, Artificial Sequence
  Description of Artificial Sequence: Synthetic oligonucleotide
ggcuuccguauauauggcauu

SEQ ID NO: 473 - RNA, 21 nt, Artificial Sequence
  Description of Artificial Sequence: Synthetic oligonucleotide
gcuuccguauauauggcaugu

SEQ ID NO: 474 - RNA, 21 nt, Artificial Sequence
  Description of Artificial Sequence: Synthetic oligonucleotide
uauauauggcaugcacagugu

SEQ ID NO: 475 - RNA, 21 nt, Artificial Sequence
  Description of Artificial Sequence: Synthetic oligonucleotide
auauauggcaugcacagugau

SEQ ID NO: 476 - RNA, 21 nt, Artificial Sequence
  Description of Artificial Sequence: Synthetic oligonucleotide
uauauggcaugcacagugagu

SEQ ID NO: 477 - RNA, 21 nt, Artificial Sequence
  Description of Artificial Sequence: Synthetic oligonucleotide
auauggcaugcacagugagcu

SEQ ID NO: 478 - RNA, 21 nt, Artificial Sequence
  Description of Artificial Sequence: Synthetic oligonucleotide
uauggcaugcacagugagcuu

SEQ ID NO: 479 - RNA, 21 nt, Artificial Sequence
  Description of Artificial Sequence: Synthetic oligonucleotide
auggcaugcacagugagcuau

SEQ ID NO: 480 - RNA, 21 nt, Artificial Sequence
  Description of Artificial Sequence: Synthetic oligonucleotide
uggcaugcacagugagcuauu

SEQ ID NO: 481 - RNA, 21 nt, Artificial Sequence
  Description of Artificial Sequence: Synthetic oligonucleotide
ggcaugcacagugagcuaugu

SEQ ID NO: 482 - RNA, 21 nt, Artificial Sequence
  Description of Artificial Sequence: Synthetic oligonucleotide
gcaugcacagugagcuauggu

SEQ ID NO: 483 - RNA, 21 nt, Artificial Sequence
  Description of Artificial Sequence: Synthetic oligonucleotide
caugcacagugagcuaugggu

SEQ ID NO: 484 - RNA, 21 nt, Artificial Sequence
  Description of Artificial Sequence: Synthetic oligonucleotide
augcacagugagcuauggggu

SEQ ID NO: 485 - RNA, 21 nt, Artificial Sequence
  Description of Artificial Sequence: Synthetic oligonucleotide
ccucuccccaacggcugucuu

SEQ ID NO: 486 - RNA, 21 nt, Artificial Sequence
  Description of Artificial Sequence: Synthetic oligonucleotide
uggcacccuggccucucucuu

SEQ ID NO: 487 - RNA, 21 nt, Artificial Sequence
  Description of Artificial Sequence: Synthetic oligonucleotide
ggcacccuggccucucucuau

SEQ ID NO: 488 - RNA, 21 nt, Artificial Sequence
  Description of Artificial Sequence: Synthetic oligonucleotide
gacaggcuacaggcaauccuu

SEQ ID NO: 489 - RNA, 21 nt, Artificial Sequence
  Description of Artificial Sequence: Synthetic oligonucleotide
acaggcuacaggcaauccugu

SEQ ID NO: 490 - RNA, 21 nt, Artificial Sequence
  Description of Artificial Sequence: Synthetic oligonucleotide
uuccuuggaaggacaagaacu

SEQ ID NO: 491 - RNA, 21 nt, Artificial Sequence
  Description of Artificial Sequence: Synthetic oligonucleotide
ccuuggaaggacaagaacugu

SEQ ID NO: 492 - RNA, 21 nt, Artificial Sequence
  Description of Artificial Sequence: Synthetic oligonucleotide
cuuggaaggacaagaacugcu

SEQ ID NO: 493 - RNA, 21 nt, Artificial Sequence
  Description of Artificial Sequence: Synthetic oligonucleotide
caccugaagcagccguuuguu

SEQ ID NO: 494 - RNA, 21 nt, Artificial Sequence
  Description of Artificial Sequence: Synthetic oligonucleotide
cugaagcagccguuugugcau

SEQ ID NO: 495 - RNA, 21 nt, Artificial Sequence
  Description of Artificial Sequence: Synthetic oligonucleotide
uuugugcagggccuggcucuu

SEQ ID NO: 496 - RNA, 21 nt, Artificial Sequence
  Description of Artificial Sequence: Synthetic oligonucleotide
uugugcagggccuggcucucu

SEQ ID NO: 497 - RNA, 21 nt, Artificial Sequence
  Description of Artificial Sequence: Synthetic oligonucleotide
ugugcagggccuggcucucuu

SEQ ID NO: 498 - RNA, 21 nt, Artificial Sequence
  Description of Artificial Sequence: Synthetic oligonucleotide
gugcagggccuggcucucuau

SEQ ID NO: 499 - RNA, 21 nt, Artificial Sequence
  Description of Artificial Sequence: Synthetic oligonucleotide
ugcagggccuggcucucuauu

SEQ ID NO: 500 - RNA, 21 nt, Artificial Sequence
  Description of Artificial Sequence: Synthetic oligonucleotide
acgcucucuggacuucacagu

SEQ ID NO: 501 - RNA, 21 nt, Artificial Sequence
  Description of Artificial Sequence: Synthetic oligonucleotide
cgcucucuggacuucacagau

SEQ ID NO: 502 - RNA, 21 nt, Artificial Sequence
  Description of Artificial Sequence: Synthetic oligonucleotide
cugagaagauugacagguucu

SEQ ID NO: 503 - RNA, 21 nt, Artificial Sequence
  Description of Artificial Sequence: Synthetic oligonucleotide
ugagaagauugacagguucau

SEQ ID NO: 504 - RNA, 21 nt, Artificial Sequence
  Description of Artificial Sequence: Synthetic oligonucleotide
gagaagauugacagguucauu

SEQ ID NO: 505 - RNA, 21 nt, Artificial Sequence
  Description of Artificial Sequence: Synthetic oligonucleotide
agaagauugacagguucaugu

SEQ ID NO: 506 - RNA, 21 nt, Artificial Sequence
  Description of Artificial Sequence: Synthetic oligonucleotide
gaagauugacagguucaugcu

SEQ ID NO: 507 - RNA, 21 nt, Artificial Sequence
  Description of Artificial Sequence: Synthetic oligonucleotide
aagauugacagguucaugcau

SEQ ID NO: 508 - RNA, 21 nt, Artificial Sequence
  Description of Artificial Sequence: Synthetic oligonucleotide
agauugacagguucaugcagu

SEQ ID NO: 509 - RNA, 21 nt, Artificial Sequence
  Description of Artificial Sequence: Synthetic oligonucleotide
gauugacagguucaugcaggu

SEQ ID NO: 510 - RNA, 21 nt, Artificial Sequence
  Description of Artificial Sequence: Synthetic oligonucleotide
auugacagguucaugcaggcu

SEQ ID NO: 511 - RNA, 21 nt, Artificial Sequence
  Description of Artificial Sequence: Synthetic oligonucleotide
uugacagguucaugcaggcuu

SEQ ID NO: 512 - RNA, 21 nt, Artificial Sequence
  Description of Artificial Sequence: Synthetic oligonucleotide
ugacagguucaugcaggcugu

SEQ ID NO: 513 - RNA, 21 nt, Artificial Sequence
  Description of Artificial Sequence: Synthetic oligonucleotide
gacagguucaugcaggcuguu

SEQ ID NO: 514 - RNA, 21 nt, Artificial Sequence
  Description of Artificial Sequence: Synthetic oligonucleotide
acagguucaugcaggcugugu

SEQ ID NO: 515 - RNA, 21 nt, Artificial Sequence
  Description of Artificial Sequence: Synthetic oligonucleotide
augcaggcugugacaggaugu

SEQ ID NO: 516 - RNA, 21 nt, Artificial Sequence
  Description of Artificial Sequence: Synthetic oligonucleotide
gcaggcugugacaggauggau

SEQ ID NO: 517 - RNA, 21 nt, Artificial Sequence
  Description of Artificial Sequence: Synthetic oligonucleotide
caggcugugacaggauggaau

SEQ ID NO: 518 - RNA, 21 nt, Artificial Sequence
  Description of Artificial Sequence: Synthetic oligonucleotide
gcuuucaacaccuacguccau

SEQ ID NO: 519 - RNA, 21 nt, Artificial Sequence
  Description of Artificial Sequence: Synthetic oligonucleotide
gaguucuggguggacaacagu

SEQ ID NO: 520 - RNA, 21 nt, Artificial Sequence
  Description of Artificial Sequence: Synthetic oligonucleotide
ggacaacagcaccucaguguu

SEQ ID NO: 521 - RNA, 21 nt, Artificial Sequence
  Description of Artificial Sequence: Synthetic oligonucleotide
gacaacagcaccucagugucu

SEQ ID NO: 522 - RNA, 21 nt, Artificial Sequence
  Description of Artificial Sequence: Synthetic oligonucleotide
acaacagcaccucagugucuu

SEQ ID NO: 523 - RNA, 21 nt, Artificial Sequence
  Description of Artificial Sequence: Synthetic oligonucleotide
caacagcaccucagugucugu

SEQ ID NO: 524 - RNA, 21 nt, Artificial Sequence
  Description of Artificial Sequence: Synthetic oligonucleotide
aacagcaccucagugucuguu

SEQ ID NO: 525 - RNA, 21 nt, Artificial Sequence
  Description of Artificial Sequence: Synthetic oligonucleotide
augccucugaccuggacaagu

SEQ ID NO: 526 - RNA, 21 nt, Artificial Sequence
  Description of Artificial Sequence: Synthetic oligonucleotide
aagguggagggucucacuuuu

SEQ ID NO: 527 - RNA, 21 nt, Artificial Sequence
  Description of Artificial Sequence: Synthetic oligonucleotide
agguggagggucucacuuucu

SEQ ID NO: 528 - RNA, 21 nt, Artificial Sequence
  Description of Artificial Sequence: Synthetic oligonucleotide
gguggagggucucacuuuccu

SEQ ID NO: 529 - RNA, 21 nt, Artificial Sequence
  Description of Artificial Sequence: Synthetic oligonucleotide
gagggucucacuuuccagcau

SEQ ID NO: 530 - RNA, 21 nt, Artificial Sequence
  Description of Artificial Sequence: Synthetic oligonucleotide
agggucucacuuuccagcaau

SEQ ID NO: 531 - RNA, 21 nt, Artificial Sequence
  Description of Artificial Sequence: Synthetic oligonucleotide
ggucucacuuuccagcaaaau

SEQ ID NO: 532 - RNA, 21 nt, Artificial Sequence
  Description of Artificial Sequence: Synthetic oligonucleotide
gucucacuuuccagcaaaacu

SEQ ID NO: 533 - RNA, 21 nt, Artificial Sequence
  Description of Artificial Sequence: Synthetic oligonucleotide
ucucacuuuccagcaaaacuu

SEQ ID NO: 534 - RNA, 21 nt, Artificial Sequence
  Description of Artificial Sequence: Synthetic oligonucleotide
cucacuuuccagcaaaacucu

SEQ ID NO: 535 - RNA, 21 nt, Artificial Sequence
  Description of Artificial Sequence: Synthetic oligonucleotide
ucacuuuccagcaaaacuccu

SEQ ID NO: 536 - RNA, 21 nt, Artificial Sequence
  Description of Artificial Sequence: Synthetic oligonucleotide
cacuuuccagcaaaacucccu

SEQ ID NO: 537 - RNA, 21 nt, Artificial Sequence
  Description of Artificial Sequence: Synthetic oligonucleotide
acuuuccagcaaaacucccuu

SEQ ID NO: 538 - RNA, 21 nt, Artificial Sequence
  Description of Artificial Sequence: Synthetic oligonucleotide
cuuuccagcaaaacucccucu

SEQ ID NO: 539 - RNA, 21 nt, Artificial Sequence
  Description of Artificial Sequence: Synthetic oligonucleotide
uuuccagcaaaacucccucau

SEQ ID NO: 540 - RNA, 21 nt, Artificial Sequence
  Description of Artificial Sequence: Synthetic oligonucleotide
uuccagcaaaacucccucaau

SEQ ID NO: 541 - RNA, 21 nt, Artificial Sequence
  Description of Artificial Sequence: Synthetic oligonucleotide
uccagcaaaacucccucaacu

SEQ ID NO: 542 - RNA, 21 nt, Artificial Sequence
  Description of Artificial Sequence: Synthetic oligonucleotide
ccagcaaaacucccucaacuu

SEQ ID NO: 543 - RNA, 21 nt, Artificial Sequence
  Description of Artificial Sequence: Synthetic oligonucleotide
cagcaaaacucccucaacugu

SEQ ID NO: 544 - RNA, 21 nt, Artificial Sequence
  Description of Artificial Sequence: Synthetic oligonucleotide
agcaaaacucccucaacuggu

SEQ ID NO: 545 - RNA, 21 nt, Artificial Sequence
  Description of Artificial Sequence: Synthetic oligonucleotide
gcaaaacucccucaacuggau

SEQ ID NO: 546 - RNA, 21 nt, Artificial Sequence
  Description of Artificial Sequence: Synthetic oligonucleotide
caaaacucccucaacuggauu

SEQ ID NO: 547 - RNA, 21 nt, Artificial Sequence
  Description of Artificial Sequence: Synthetic oligonucleotide
aaaacucccucaacuggaugu

SEQ ID NO: 548 - RNA, 21 nt, Artificial Sequence
  Description of Artificial Sequence: Synthetic oligonucleotide
aaacucccucaacuggaugau

SEQ ID NO: 549 - RNA, 21 nt, Artificial Sequence
  Description of Artificial Sequence: Synthetic oligonucleotide
aacucccucaacuggaugaau

SEQ ID NO: 550 - RNA, 21 nt, Artificial Sequence
  Description of Artificial Sequence: Synthetic oligonucleotide
acucccucaacuggaugaagu

SEQ ID NO: 551 - RNA, 21 nt, Artificial Sequence
  Description of Artificial Sequence: Synthetic oligonucleotide
cucccucaacuggaugaagau

SEQ ID NO: 552 - RNA, 21 nt, Artificial Sequence
  Description of Artificial Sequence: Synthetic oligonucleotide
ucccucaacuggaugaagaau

SEQ ID NO: 553 - RNA, 21 nt, Artificial Sequence
  Description of Artificial Sequence: Synthetic oligonucleotide
cccucaacuggaugaagaaau

SEQ ID NO: 554 - RNA, 21 nt, Artificial Sequence
  Description of Artificial Sequence: Synthetic oligonucleotide
cucaacuggaugaagaaacuu

SEQ ID NO: 555 - RNA, 21 nt, Artificial Sequence
  Description of Artificial Sequence: Synthetic oligonucleotide
aggaucuuaugaccugcaggu

SEQ ID NO: 556 - RNA, 21 nt, Artificial Sequence
  Description of Artificial Sequence: Synthetic oligonucleotide
cuuaugaccugcaggaccugu

SEQ ID NO: 557 - RNA, 21 nt, Artificial Sequence
  Description of Artificial Sequence: Synthetic oligonucleotide
cgagcugaaccugcaaaaauu

SEQ ID NO: 558 - RNA, 21 nt, Artificial Sequence
  Description of Artificial Sequence: Synthetic oligonucleotide
gagcugaaccugcaaaaauuu

SEQ ID NO: 559 - RNA, 21 nt, Artificial Sequence
  Description of Artificial Sequence: Synthetic oligonucleotide
agcugaaccugcaaaaauugu

SEQ ID NO: 560 - RNA, 21 nt, Artificial Sequence
  Description of Artificial Sequence: Synthetic oligonucleotide
gcugaaccugcaaaaauugau

SEQ ID NO: 561 - RNA, 21 nt, Artificial Sequence
  Description of Artificial Sequence: Synthetic oligonucleotide
cugaaccugcaaaaauugagu

SEQ ID NO: 562 - RNA, 21 nt, Artificial Sequence
  Description of Artificial Sequence: Synthetic oligonucleotide
ugaaccugcaaaaauugagcu

SEQ ID NO: 563 - RNA, 21 nt, Artificial Sequence
  Description of Artificial Sequence: Synthetic oligonucleotide
gaaccugcaaaaauugagcau

SEQ ID NO: 564 - RNA, 21 nt, Artificial Sequence
  Description of Artificial Sequence: Synthetic oligonucleotide
aaccugcaaaaauugagcaau

SEQ ID NO: 565 - RNA, 21 nt, Artificial Sequence
  Description of Artificial Sequence: Synthetic oligonucleotide
accugcaaaaauugagcaauu

SEQ ID NO: 566 - RNA, 21 nt, Artificial Sequence
  Description of Artificial Sequence: Synthetic oligonucleotide
ccugcaaaaauugagcaaugu

SEQ ID NO: 567 - RNA, 21 nt, Artificial Sequence
  Description of Artificial Sequence: Synthetic oligonucleotide
cugcaaaaauugagcaaugau

SEQ ID NO: 568 - RNA, 21 nt, Artificial Sequence
  Description of Artificial Sequence: Synthetic oligonucleotide
ugcaaaaauugagcaaugacu

SEQ ID NO: 569 - RNA, 21 nt, Artificial Sequence
  Description of Artificial Sequence: Synthetic oligonucleotide
gaggugcugaacagcauuuuu

SEQ ID NO: 570 - RNA, 21 nt, Artificial Sequence
  Description of Artificial Sequence: Synthetic oligonucleotide
aggugcugaacagcauuuuuu

SEQ ID NO: 571 - RNA, 21 nt, Artificial Sequence
  Description of Artificial Sequence: Synthetic oligonucleotide
ggugcugaacagcauuuuuuu

SEQ ID NO: 572 - RNA, 21 nt, Artificial Sequence
  Description of Artificial Sequence: Synthetic oligonucleotide
gugcugaacagcauuuuuuuu

SEQ ID NO: 573 - RNA, 21 nt, Artificial Sequence
  Description of Artificial Sequence: Synthetic oligonucleotide
ugcugaacagcauuuuuuuuu

SEQ ID NO: 574 - RNA, 21 nt, Artificial Sequence
  Description of Artificial Sequence: Synthetic oligonucleotide
gcugaacagcauuuuuuuugu

SEQ ID NO: 575 - RNA, 21 nt, Artificial Sequence
  Description of Artificial Sequence: Synthetic oligonucleotide
cugaacagcauuuuuuuugau

SEQ ID NO: 576 - RNA, 21 nt, Artificial Sequence
  Description of Artificial Sequence: Synthetic oligonucleotide
ugagagagagcccacagaguu

SEQ ID NO: 577 - RNA, 21 nt, Artificial Sequence
  Description of Artificial Sequence: Synthetic oligonucleotide
agagagagcccacagagucuu

SEQ ID NO: 578 - RNA, 21 nt, Artificial Sequence
  Description of Artificial Sequence: Synthetic oligonucleotide
gagagagcccacagagucuau

SEQ ID NO: 579 - RNA, 21 nt, Artificial Sequence
  Description of Artificial Sequence: Synthetic oligonucleotide
gaaccgcccauuccuguuugu

SEQ ID NO: 580 - RNA, 21 nt, Artificial Sequence
  Description of Artificial Sequence: Synthetic oligonucleotide
aaccgcccauuccuguuugcu

SEQ ID NO: 581 - RNA, 21 nt, Artificial Sequence
  Description of Artificial Sequence: Synthetic oligonucleotide
accgcccauuccuguuugcuu

SEQ ID NO: 582 - RNA, 21 nt, Artificial Sequence
  Description of Artificial Sequence: Synthetic oligonucleotide
ccgcccauuccuguuugcugu

SEQ ID NO: 583 - RNA, 21 nt, Artificial Sequence
  Description of Artificial Sequence: Synthetic oligonucleotide
cgcccauuccuguuugcuguu

SEQ ID NO: 584 - RNA, 21 nt, Artificial Sequence
  Description of Artificial Sequence: Synthetic oligonucleotide
gcccauuccuguuugcugugu

SEQ ID NO: 585 - RNA, 21 nt, Artificial Sequence
  Description of Artificial Sequence: Synthetic oligonucleotide
cccauuccuguuugcuguguu

SEQ ID NO: 586 - RNA, 21 nt, Artificial Sequence
  Description of Artificial Sequence: Synthetic oligonucleotide
ccauuccuguuugcuguguau

SEQ ID NO: 587 - RNA, 21 nt, Artificial Sequence
  Description of Artificial Sequence: Synthetic oligonucleotide
cauuccuguuugcuguguauu

SEQ ID NO: 588 - RNA, 21 nt, Artificial Sequence
  Description of Artificial Sequence: Synthetic oligonucleotide
auuccuguuugcuguguaugu

SEQ ID NO: 589 - RNA, 21 nt, Artificial Sequence
  Description of Artificial Sequence: Synthetic oligonucleotide
uuccuguuugcuguguaugau

SEQ ID NO: 590 - RNA, 21 nt, Artificial Sequence
  Description of Artificial Sequence: Synthetic oligonucleotide
uccuguuugcuguguaugauu

SEQ ID NO: 591 - RNA, 21 nt, Artificial Sequence
  Description of Artificial Sequence: Synthetic oligonucleotide
ccuguuugcuguguaugaucu

SEQ ID NO: 592 - RNA, 21 nt, Artificial Sequence
  Description of Artificial Sequence: Synthetic oligonucleotide
cuguuugcuguguaugaucau

SEQ ID NO: 593 - RNA, 21 nt, Artificial Sequence
  Description of Artificial Sequence: Synthetic oligonucleotide
uguuugcuguguaugaucaau

SEQ ID NO: 594 - RNA, 21 nt, Artificial Sequence
  Description of Artificial Sequence: Synthetic oligonucleotide
guuugcuguguaugaucaaau

SEQ ID NO: 595 - RNA, 21 nt, Artificial Sequence
  Description of Artificial Sequence: Synthetic oligonucleotide
uuugcuguguaugaucaaagu

SEQ ID NO: 596 - RNA, 21 nt, Artificial Sequence
  Description of Artificial Sequence: Synthetic oligonucleotide
ccccagucucccaccuuuucu

SEQ ID NO: 597 - RNA, 21 nt, Artificial Sequence
  Description of Artificial Sequence: Synthetic oligonucleotide
cccagucucccaccuuuucuu

SEQ ID NO: 598 - RNA, 21 nt, Artificial Sequence
  Description of Artificial Sequence: Synthetic oligonucleotide
ccagucucccaccuuuucuuu

SEQ ID NO: 599 - RNA, 21 nt, Artificial Sequence
  Description of Artificial Sequence: Synthetic oligonucleotide
agucucccaccuuuucuucuu

SEQ ID NO: 600 - RNA, 21 nt, Artificial Sequence
  Description of Artificial Sequence: Synthetic oligonucleotide
gucucccaccuuuucuucuau

SEQ ID NO: 601 - RNA, 21 nt, Artificial Sequence
  Description of Artificial Sequence: Synthetic oligonucleotide
cucccaccuuuucuucuaauu

SEQ ID NO: 602 - RNA, 21 nt, Artificial Sequence
  Description of Artificial Sequence: Synthetic oligonucleotide
ucccaccuuuucuucuaaugu

SEQ ID NO: 603 - RNA, 21 nt, Artificial Sequence
  Description of Artificial Sequence: Synthetic oligonucleotide
cccaccuuuucuucuaaugau

SEQ ID NO: 604 - RNA, 21 nt, Artificial Sequence
  Description of Artificial Sequence: Synthetic oligonucleotide
ccaccuuuucuucuaaugagu

SEQ ID NO: 605 - RNA, 21 nt, Artificial Sequence
  Description of Artificial Sequence: Synthetic oligonucleotide
caccuuuucuucuaaugaguu

SEQ ID NO: 606 - RNA, 21 nt, Artificial Sequence
  Description of Artificial Sequence: Synthetic oligonucleotide
accuuuucuucuaaugagucu

SEQ ID NO: 607 - RNA, 21 nt, Artificial Sequence
  Description of Artificial Sequence: Synthetic oligonucleotide
ccguuucuccuuggucuaagu

SEQ ID NO: 608 - RNA, 21 nt, Artificial Sequence
  Description of Artificial Sequence: Synthetic oligonucleotide
cguuucuccuuggucuaaguu

SEQ ID NO: 609 - RNA, 21 nt, Artificial Sequence
  Description of Artificial Sequence: Synthetic oligonucleotide
guuucuccuuggucuaagugu

SEQ ID NO: 610 - RNA, 21 nt, Artificial Sequence
  Description of Artificial Sequence: Synthetic oligonucleotide
guuugcuggguuuauuuuagu

SEQ ID NO: 611 - RNA, 21 nt, Artificial Sequence
  Description of Artificial Sequence: Synthetic oligonucleotide
uuugcuggguuuauuuuagau

SEQ ID NO: 612 - RNA, 21 nt, Artificial Sequence
  Description of Artificial Sequence: Synthetic oligonucleotide
uugcuggguuuauuuuagagu

SEQ ID NO: 613 - RNA, 21 nt, Artificial Sequence
  Description of Artificial Sequence: Synthetic oligonucleotide
ugcuggguuuauuuuagagau

SEQ ID NO: 614 - RNA, 21 nt, Artificial Sequence
  Description of Artificial Sequence: Synthetic oligonucleotide
gcuggguuuauuuuagagaau

SEQ ID NO: 615 - RNA, 21 nt, Artificial Sequence
  Description of Artificial Sequence: Synthetic oligonucleotide
cuggguuuauuuuagagaauu

SEQ ID NO: 616 - RNA, 21 nt, Artificial Sequence
  Description of Artificial Sequence: Synthetic oligonucleotide
uggguuuauuuuagagaaugu

SEQ ID NO: 617 - RNA, 21 nt, Artificial Sequence
  Description of Artificial Sequence: Synthetic oligonucleotide
ggguuuauuuuagagaauggu

SEQ ID NO: 618 - RNA, 21 nt, Artificial Sequence
  Description of Artificial Sequence: Synthetic oligonucleotide
gguuuauuuuagagaaugggu

SEQ ID NO: 619 - RNA, 21 nt, Artificial Sequence
  Description of Artificial Sequence: Synthetic oligonucleotide
guuuauuuuagagaauggggu

SEQ ID NO: 620 - RNA, 21 nt, Artificial Sequence
  Description of Artificial Sequence: Synthetic oligonucleotide
uuuauuuuagagaaugggggu

SEQ ID NO: 621 - RNA, 21 nt, Artificial Sequence
  Description of Artificial Sequence: Synthetic oligonucleotide
agaauggggguggggaggcau

SEQ ID NO: 622 - RNA, 21 nt, Artificial Sequence
  Description of Artificial Sequence: Synthetic oligonucleotide
gaauggggguggggaggcaau

SEQ ID NO: 623 - RNA, 21 nt, Artificial Sequence
  Description of Artificial Sequence: Synthetic oligonucleotide
aauggggguggggaggcaagu

SEQ ID NO: 624 - RNA, 21 nt, Artificial Sequence
  Description of Artificial Sequence: Synthetic oligonucleotide
auggggguggggaggcaagau

SEQ ID NO: 625 - RNA, 21 nt, Artificial Sequence
  Description of Artificial Sequence: Synthetic oligonucleotide
uggggguggggaggcaagaau

SEQ ID NO: 626 - RNA, 21 nt, Artificial Sequence
  Description of Artificial Sequence: Synthetic oligonucleotide
ggggguggggaggcaagaacu

SEQ ID NO: 627 - RNA, 21 nt, Artificial Sequence
  Description of Artificial Sequence: Synthetic oligonucleotide
guggggaggcaagaaccaguu

SEQ ID NO: 628 - RNA, 21 nt, Artificial Sequence
  Description of Artificial Sequence: Synthetic oligonucleotide
uggggaggcaagaaccagugu

SEQ ID NO: 629 - RNA, 21 nt, Artificial Sequence
  Description of Artificial Sequence: Synthetic oligonucleotide
ggggaggcaagaaccaguguu

SEQ ID NO: 630 - RNA, 21 nt, Artificial Sequence
  Description of Artificial Sequence: Synthetic oligonucleotide
gggaggcaagaaccaguguuu

SEQ ID NO: 631 - RNA, 21 nt, Artificial Sequence
  Description of Artificial Sequence: Synthetic oligonucleotide
ggaggcaagaaccaguguuuu

SEQ ID NO: 632 - RNA, 21 nt, Artificial Sequence
  Description of Artificial Sequence: Synthetic oligonucleotide
gaggcaagaaccaguguuuau

SEQ ID NO: 633 - RNA, 21 nt, Artificial Sequence
  Description of Artificial Sequence: Synthetic oligonucleotide
aggcaagaaccaguguuuagu

SEQ ID NO: 634 - RNA, 21 nt, Artificial Sequence
  Description of Artificial Sequence: Synthetic oligonucleotide
ggcaagaaccaguguuuagcu

SEQ ID NO: 635 - RNA, 21 nt, Artificial Sequence
  Description of Artificial Sequence: Synthetic oligonucleotide
gcaagaaccaguguuuagcgu

SEQ ID NO: 636 - RNA, 21 nt, Artificial Sequence
  Description of Artificial Sequence: Synthetic oligonucleotide
caagaaccaguguuuagcgcu

SEQ ID NO: 637 - RNA, 21 nt, Artificial Sequence
  Description of Artificial Sequence: Synthetic oligonucleotide
aagaaccaguguuuagcgcgu

SEQ ID NO: 638 - RNA, 21 nt, Artificial Sequence
  Description of Artificial Sequence: Synthetic oligonucleotide
agaaccaguguuuagcgcggu

SEQ ID NO: 639 - RNA, 21 nt, Artificial Sequence
  Description of Artificial Sequence: Synthetic oligonucleotide
gaaccaguguuuagcgcgggu

SEQ ID NO: 640 - RNA, 21 nt, Artificial Sequence
  Description of Artificial Sequence: Synthetic oligonucleotide
aaccaguguuuagcgcgggau

SEQ ID NO: 641 - RNA, 21 nt, Artificial Sequence
  Description of Artificial Sequence: Synthetic oligonucleotide
cuguuccaaaaagaauuccau

SEQ ID NO: 642 - RNA, 21 nt, Artificial Sequence
  Description of Artificial Sequence: Synthetic oligonucleotide
guuccaaaaagaauuccaacu

SEQ ID NO: 643 - RNA, 21 nt, Artificial Sequence
  Description of Artificial Sequence: Synthetic oligonucleotide
uccaaaaagaauuccaaccgu

SEQ ID NO: 644 - RNA, 21 nt, Artificial Sequence
  Description of Artificial Sequence: Synthetic oligonucleotide
ccaaaaagaauuccaaccgau

SEQ ID NO: 645 - RNA, 21 nt, Artificial Sequence
  Description of Artificial Sequence: Synthetic oligonucleotide
caaaaagaauuccaaccgacu

SEQ ID NO: 646 - RNA, 21 nt, Artificial Sequence
  Description of Artificial Sequence: Synthetic oligonucleotide
aaaaagaauuccaaccgaccu

SEQ ID NO: 647 - RNA, 21 nt, Artificial Sequence
  Description of Artificial Sequence: Synthetic oligonucleotide
aaaagaauuccaaccgaccau

SEQ ID NO: 648 - RNA, 21 nt, Artificial Sequence
  Description of Artificial Sequence: Synthetic oligonucleotide
aaagaauuccaaccgaccagu

SEQ ID NO: 649 - RNA, 21 nt, Artificial Sequence
  Description of Artificial Sequence: Synthetic oligonucleotide
aagaauuccaaccgaccagcu

SEQ ID NO: 650 - RNA, 21 nt, Artificial Sequence
  Description of Artificial Sequence: Synthetic oligonucleotide
agaauuccaaccgaccagcuu

SEQ ID NO: 651 - RNA, 21 nt, Artificial Sequence
  Description of Artificial Sequence: Synthetic oligonucleotide
gaauuccaaccgaccagcuuu

SEQ ID NO: 652 - RNA, 21 nt, Artificial Sequence
  Description of Artificial Sequence: Synthetic oligonucleotide
aauuccaaccgaccagcuugu

SEQ ID NO: 653 - RNA, 21 nt, Artificial Sequence
  Description of Artificial Sequence: Synthetic oligonucleotide
auuccaaccgaccagcuuguu

SEQ ID NO: 654 - RNA, 21 nt, Artificial Sequence
  Description of Artificial Sequence: Synthetic oligonucleotide
uuccaaccgaccagcuuguuu

SEQ ID NO: 655 - RNA, 21 nt, Artificial Sequence
  Description of Artificial Sequence: Synthetic oligonucleotide
uccaaccgaccagcuuguuuu

SEQ ID NO: 656 - RNA, 21 nt, Artificial Sequence
  Description of Artificial Sequence: Synthetic oligonucleotide
ccaaccgaccagcuuguuugu

SEQ ID NO: 657 - RNA, 21 nt, Artificial Sequence
  Description of Artificial Sequence: Synthetic oligonucleotide
caaccgaccagcuuguuuguu

SEQ ID NO: 658 - RNA, 21 nt, Artificial Sequence
  Description of Artificial Sequence: Synthetic oligonucleotide
aaccgaccagcuuguuugugu

SEQ ID NO: 659 - RNA, 21 nt, Artificial Sequence
  Description of Artificial Sequence: Synthetic oligonucleotide
accgaccagcuuguuugugau

SEQ ID NO: 660 - RNA, 21 nt, Artificial Sequence
  Description of Artificial Sequence: Synthetic oligonucleotide
ccgaccagcuuguuugugaau

SEQ ID NO: 661 - RNA, 21 nt, Artificial Sequence
  Description of Artificial Sequence: Synthetic oligonucleotide
cgaccagcuuguuugugaaau

SEQ ID NO: 662 - RNA, 21 nt, Artificial Sequence
  Description of Artificial Sequence: Synthetic oligonucleotide
gaccagcuuguuugugaaacu

SEQ ID NO: 663 - RNA, 21 nt, Artificial Sequence
  Description of Artificial Sequence: Synthetic oligonucleotide
accagcuuguuugugaaacau

SEQ ID NO: 664 - RNA, 21 nt, Artificial Sequence
  Description of Artificial Sequence: Synthetic oligonucleotide
ccagcuuguuugugaaacaau

SEQ ID NO: 665 - RNA, 21 nt, Artificial Sequence
  Description of Artificial Sequence: Synthetic oligonucleotide
cagcuuguuugugaaacaaau

SEQ ID NO: 666 - RNA, 21 nt, Artificial Sequence
  Description of Artificial Sequence: Synthetic oligonucleotide
agcuuguuugugaaacaaaau

SEQ ID NO: 667 - RNA, 21 nt, Artificial Sequence
  Description of Artificial Sequence: Synthetic oligonucleotide
gcuuguuugugaaacaaaaau

SEQ ID NO: 668 - RNA, 21 nt, Artificial Sequence
  Description of Artificial Sequence: Synthetic oligonucleotide
cuuguuugugaaacaaaaaau

SEQ ID NO: 669 - RNA, 21 nt, Artificial Sequence
  Description of Artificial Sequence: Synthetic oligonucleotide
uuguuugugaaacaaaaaagu

SEQ ID NO: 670 - RNA, 21 nt, Artificial Sequence
  Description of Artificial Sequence: Synthetic oligonucleotide
uguucccuuuucaaguugagu

SEQ ID NO: 671 - RNA, 21 nt, Artificial Sequence
  Description of Artificial Sequence: Synthetic oligonucleotide
guucccuuuucaaguugagau

SEQ ID NO: 672 - RNA, 21 nt, Artificial Sequence
  Description of Artificial Sequence: Synthetic oligonucleotide
uucccuuuucaaguugagaau

SEQ ID NO: 673 - RNA, 21 nt, Artificial Sequence
  Description of Artificial Sequence: Synthetic oligonucleotide
caaguugagaacaaaaauugu

SEQ ID NO: 674 - RNA, 21 nt, Artificial Sequence
  Description of Artificial Sequence: Synthetic oligonucleotide
aaguugagaacaaaaauuggu

SEQ ID NO: 675 - RNA, 21 nt, Artificial Sequence
  Description of Artificial Sequence: Synthetic oligonucleotide
aguugagaacaaaaauugggu

SEQ ID NO: 676 - RNA, 21 nt, Artificial Sequence
  Description of Artificial Sequence: Synthetic oligonucleotide
guugagaacaaaaauuggguu

SEQ ID NO: 677 - RNA, 21 nt, Artificial Sequence
  Description of Artificial Sequence: Synthetic oligonucleotide
uugagaacaaaaauuggguuu

SEQ ID NO: 678 - RNA, 21 nt, Artificial Sequence
  Description of Artificial Sequence: Synthetic oligonucleotide
ugagaacaaaaauuggguuuu

SEQ ID NO: 679 - RNA, 21 nt, Artificial Sequence
  Description of Artificial Sequence: Synthetic oligonucleotide
gagaacaaaaauuggguuuuu

SEQ ID NO: 680 - RNA, 21 nt, Artificial Sequence
  Description of Artificial Sequence: Synthetic oligonucleotide
agaacaaaaauuggguuuuau

SEQ ID NO: 681 - RNA, 21 nt, Artificial Sequence
  Description of Artificial Sequence: Synthetic oligonucleotide
gaacaaaaauuggguuuuaau

SEQ ID NO: 682 - RNA, 21 nt, Artificial Sequence
  Description of Artificial Sequence: Synthetic oligonucleotide
aguauacauuuuugcauugcu

SEQ ID NO: 683 - RNA, 21 nt, Artificial Sequence
  Description of Artificial Sequence: Synthetic oligonucleotide
guauacauuuuugcauugccu

SEQ ID NO: 684 - RNA, 21 nt, Artificial Sequence
  Description of Artificial Sequence: Synthetic oligonucleotide
uauacauuuuugcauugccuu

SEQ ID NO: 685 - RNA, 21 nt, Artificial Sequence
  Description of Artificial Sequence: Synthetic oligonucleotide
auacauuuuugcauugccuuu

SEQ ID NO: 686 - RNA, 21 nt, Artificial Sequence
  Description of Artificial Sequence: Synthetic oligonucleotide
auuuuugcauugccuucgguu

SEQ ID NO: 687 - RNA, 21 nt, Artificial Sequence
  Description of Artificial Sequence: Synthetic oligonucleotide
uuuuugcauugccuucgguuu

SEQ ID NO: 688 - RNA, 21 nt, Artificial Sequence
  Description of Artificial Sequence: Synthetic oligonucleotide
uuuugcauugccuucgguuuu

SEQ ID NO: 689 - RNA, 21 nt, Artificial Sequence
  Description of Artificial Sequence: Synthetic oligonucleotide
uuugcauugccuucgguuugu

SEQ ID NO: 690 - RNA, 21 nt, Artificial Sequence
  Description of Artificial Sequence: Synthetic oligonucleotide
uugcauugccuucgguuuguu

SEQ ID NO: 691 - RNA, 21 nt, Artificial Sequence
  Description of Artificial Sequence: Synthetic oligonucleotide
ugcauugccuucgguuuguau

SEQ ID NO: 692 - RNA, 21 nt, Artificial Sequence
  Description of Artificial Sequence: Synthetic oligonucleotide
gcauugccuucgguuuguauu

SEQ ID NO: 693 - RNA, 21 nt, Artificial Sequence
  Description of Artificial Sequence: Synthetic oligonucleotide
cauugccuucgguuuguauuu

SEQ ID NO: 694 - RNA, 21 nt, Artificial Sequence
  Description of Artificial Sequence: Synthetic oligonucleotide
auugccuucgguuuguauuuu

SEQ ID NO: 695 - RNA, 21 nt, Artificial Sequence
  Description of Artificial Sequence: Synthetic oligonucleotide
uugccuucgguuuguauuuau

SEQ ID NO: 696 - RNA, 21 nt, Artificial Sequence
  Description of Artificial Sequence: Synthetic oligonucleotide
ugccuucgguuuguauuuagu

SEQ ID NO: 697 - RNA, 21 nt, Artificial Sequence
  Description of Artificial Sequence: Synthetic oligonucleotide
gccuucgguuuguauuuaguu

SEQ ID NO: 698 - RNA, 21 nt, Artificial Sequence
  Description of Artificial Sequence: Synthetic oligonucleotide
ccuucgguuuguauuuagugu

SEQ ID NO: 699 - RNA, 21 nt, Artificial Sequence
  Description of Artificial Sequence: Synthetic oligonucleotide
cuucgguuuguauuuaguguu

SEQ ID NO: 700 - RNA, 21 nt, Artificial Sequence
  Description of Artificial Sequence: Synthetic oligonucleotide
uucgguuuguauuuagugucu

SEQ ID NO: 701 - RNA, 21 nt, Artificial Sequence
  Description of Artificial Sequence: Synthetic oligonucleotide
ucgguuuguauuuagugucuu

SEQ ID NO: 702 - RNA, 21 nt, Artificial Sequence
  Description of Artificial Sequence: Synthetic oligonucleotide
cgguuuguauuuagugucuuu

SEQ ID NO: 703 - RNA, 21 nt, Artificial Sequence
  Description of Artificial Sequence: Synthetic oligonucleotide
gguuuguauuuagugucuugu

SEQ ID NO: 704 - RNA, 21 nt, Artificial Sequence
  Description of Artificial Sequence: Synthetic oligonucleotide
guuuguauuuagugucuugau

SEQ ID NO: 705 - RNA, 21 nt, Artificial Sequence
  Description of Artificial Sequence: Synthetic oligonucleotide
uuuguauuuagugucuugaau

SEQ ID NO: 706 - RNA, 21 nt, Artificial Sequence
  Description of Artificial Sequence: Synthetic oligonucleotide
uuguauuuagugucuugaauu

SEQ ID NO: 707 - RNA, 21 nt, Artificial Sequence
  Description of Artificial Sequence: Synthetic oligonucleotide
uguauuuagugucuugaaugu

SEQ ID NO: 708 - RNA, 21 nt, Artificial Sequence
  Description of Artificial Sequence: Synthetic oligonucleotide
guauuuagugucuugaauguu

SEQ ID NO: 709 - RNA, 21 nt, Artificial Sequence
  Description of Artificial Sequence: Synthetic oligonucleotide
uauuuagugucuugaauguau

SEQ ID NO: 710 - RNA, 21 nt, Artificial Sequence
  Description of Artificial Sequence: Synthetic oligonucleotide
auuuagugucuugaauguaau

SEQ ID NO: 711 - RNA, 21 nt, Artificial Sequence
  Description of Artificial Sequence: Synthetic oligonucleotide
uuuagugucuugaauguaagu

SEQ ID NO: 712 - RNA, 21 nt, Artificial Sequence
  Description of Artificial Sequence: Synthetic oligonucleotide
uuagugucuugaauguaagau

SEQ ID NO: 713 - RNA, 21 nt, Artificial Sequence
  Description of Artificial Sequence: Synthetic oligonucleotide
uagugucuugaauguaagaau

SEQ ID NO: 714 - RNA, 21 nt, Artificial Sequence
  Description of Artificial Sequence: Synthetic oligonucleotide
agugucuugaauguaagaacu

SEQ ID NO: 715 - RNA, 21 nt, Artificial Sequence
  Description of Artificial Sequence: Synthetic oligonucleotide
ugucuugaauguaagaacauu

SEQ ID NO: 716 - RNA, 21 nt, Artificial Sequence
  Description of Artificial Sequence: Synthetic oligonucleotide
gucuugaauguaagaacaugu

SEQ ID NO: 717 - RNA, 21 nt, Artificial Sequence
  Description of Artificial Sequence: Synthetic oligonucleotide
uugaauguaagaacaugaccu

SEQ ID NO: 718 - RNA, 21 nt, Artificial Sequence
  Description of Artificial Sequence: Synthetic oligonucleotide
guaagaacaugaccuccgugu

SEQ ID NO: 719 - RNA, 21 nt, Artificial Sequence
  Description of Artificial Sequence: Synthetic oligonucleotide
uaagaacaugaccuccguguu

SEQ ID NO: 720 - RNA, 21 nt, Artificial Sequence
  Description of Artificial Sequence: Synthetic oligonucleotide
aagaacaugaccuccguguau

SEQ ID NO: 721 - RNA, 21 nt, Artificial Sequence
  Description of Artificial Sequence: Synthetic oligonucleotide
agaacaugaccuccguguagu

SEQ ID NO: 722 - RNA, 21 nt, Artificial Sequence
  Description of Artificial Sequence: Synthetic oligonucleotide
gaacaugaccuccguguaguu

SEQ ID NO: 723 - RNA, 21 nt, Artificial Sequence
  Description of Artificial Sequence: Synthetic oligonucleotide
aacaugaccuccguguagugu

SEQ ID NO: 724 - RNA, 21 nt, Artificial Sequence
  Description of Artificial Sequence: Synthetic oligonucleotide
acaugaccuccguguaguguu

SEQ ID NO: 725 - RNA, 21 nt, Artificial Sequence
  Description of Artificial Sequence: Synthetic oligonucleotide
caugaccuccguguagugucu

SEQ ID NO: 726 - RNA, 21 nt, Artificial Sequence
  Description of Artificial Sequence: Synthetic oligonucleotide
augaccuccguguagugucuu

SEQ ID NO: 727 - RNA, 21 nt, Artificial Sequence
  Description of Artificial Sequence: Synthetic oligonucleotide
cuuaguuuuuuccacagaugu

SEQ ID NO: 728 - RNA, 21 nt, Artificial Sequence
  Description of Artificial Sequence: Synthetic oligonucleotide
uuaguuuuuuccacagaugcu

SEQ ID NO: 729 - RNA, 21 nt, Artificial Sequence
  Description of Artificial Sequence: Synthetic oligonucleotide
uaguuuuuuccacagaugcuu

SEQ ID NO: 730 - RNA, 21 nt, Artificial Sequence
  Description of Artificial Sequence: Synthetic oligonucleotide
guuuuuuccacagaugcuugu

SEQ ID NO: 731 - RNA, 21 nt, Artificial Sequence
  Description of Artificial Sequence: Synthetic oligonucleotide
uuuuuccacagaugcuugugu

SEQ ID NO: 732 - RNA, 21 nt, Artificial Sequence
  Description of Artificial Sequence: Synthetic oligonucleotide
uuuuccacagaugcuugugau

SEQ ID NO: 733 - RNA, 21 nt, Artificial Sequence
  Description of Artificial Sequence: Synthetic oligonucleotide
uuuccacagaugcuugugauu

SEQ ID NO: 734 - RNA, 21 nt, Artificial Sequence
  Description of Artificial Sequence: Synthetic oligonucleotide
uuccacagaugcuugugauuu

SEQ ID NO: 735 - RNA, 21 nt, Artificial Sequence
  Description of Artificial Sequence: Synthetic oligonucleotide
uccacagaugcuugugauuuu

SEQ ID NO: 736 - RNA, 21 nt, Artificial Sequence
  Description of Artificial Sequence: Synthetic oligonucleotide
ccacagaugcuugugauuuuu

SEQ ID NO: 737 - RNA, 21 nt, Artificial Sequence
  Description of Artificial Sequence: Synthetic oligonucleotide
cacagaugcuugugauuuuuu

SEQ ID NO: 738 - RNA, 21 nt, Artificial Sequence
  Description of Artificial Sequence: Synthetic oligonucleotide
accugaauuucuguuugaauu

SEQ ID NO: 739 - RNA, 21 nt, Artificial Sequence
  Description of Artificial Sequence: Synthetic oligonucleotide
ccugaauuucuguuugaaugu

SEQ ID NO: 740 - RNA, 21 nt, Artificial Sequence
  Description of Artificial Sequence: Synthetic oligonucleotide
ggaaccauagcugguuauuuu

SEQ ID NO: 741 - RNA, 21 nt, Artificial Sequence
  Description of Artificial Sequence: Synthetic oligonucleotide
gaaccauagcugguuauuucu

SEQ ID NO: 742 - RNA, 21 nt, Artificial Sequence
  Description of Artificial Sequence: Synthetic oligonucleotide
aaccauagcugguuauuucuu

SEQ ID NO: 743 - RNA, 21 nt, Artificial Sequence
  Description of Artificial Sequence: Synthetic oligonucleotide
accauagcugguuauuucucu

SEQ ID NO: 744 - RNA, 21 nt, Artificial Sequence
  Description of Artificial Sequence: Synthetic oligonucleotide
ccauagcugguuauuucuccu

SEQ ID NO: 745 - RNA, 21 nt, Artificial Sequence
  Description of Artificial Sequence: Synthetic oligonucleotide
ccuuguguuaguaauaaacgu

SEQ ID NO: 746 - RNA, 21 nt, Artificial Sequence
  Description of Artificial Sequence: Synthetic oligonucleotide
cuuguguuaguaauaaacguu

SEQ ID NO: 747 - RNA, 21 nt, Artificial Sequence
  Description of Artificial Sequence: Synthetic oligonucleotide
uuguguuaguaauaaacgucu

SEQ ID NO: 748 - RNA, 21 nt, Artificial Sequence
  Description of Artificial Sequence: Synthetic oligonucleotide
uguguuaguaauaaacgucuu

SEQ ID NO: 749 - RNA, 21 nt, Artificial Sequence
  Description of Artificial Sequence: Synthetic oligonucleotide
guguuaguaauaaacgucuuu

SEQ ID NO: 750 - RNA, 21 nt, Artificial Sequence
  Description of Artificial Sequence: Synthetic oligonucleotide
uguuaguaauaaacgucuugu

SEQ ID NO: 751 - RNA, 21 nt, Artificial Sequence
  Description of Artificial Sequence: Synthetic oligonucleotide
guuaguaauaaacgucuugcu

SEQ ID NO: 752 - RNA, 23 nt, Artificial Sequence
  Description of Artificial Sequence: Synthetic oligonucleotide
aaggaugguggcccucaggcuca

SEQ ID NO: 753 - RNA, 23 nt, Artificial Sequence
  Description of Artificial Sequence: Synthetic oligonucleotide
aagaggaugguggcccucaggcu

SEQ ID NO: 754 - RNA, 23 nt, Artificial Sequence
  Description of Artificial Sequence: Synthetic oligonucleotide
aaggcagaggaugguggcccuca

SEQ ID NO: 755 - RNA, 23 nt, Artificial Sequence
  Description of Artificial Sequence: Synthetic oligonucleotide
aguguauguacacccggucaccu

SEQ ID NO: 756 - RNA, 23 nt, Artificial Sequence
  Description of Artificial Sequence: Synthetic oligonucleotide
aagggguguauguacacccgguc

SEQ ID NO: 757 - RNA, 23 nt, Artificial Sequence
  Description of Artificial Sequence: Synthetic oligonucleotide
aaagggguguauguacacccggu

SEQ ID NO: 758 - RNA, 23 nt, Artificial Sequence
  Description of Artificial Sequence: Synthetic oligonucleotide
agaagggguguauguacacccgg

SEQ ID NO: 759 - RNA, 23 nt, Artificial Sequence
  Description of Artificial Sequence: Synthetic oligonucleotide
aggaagggguguauguacacccg

SEQ ID NO: 760 - RNA, 23 nt, Artificial Sequence
  Description of Artificial Sequence: Synthetic oligonucleotide
auggaagggguguauguacaccc

SEQ ID NO: 761 - RNA, 23 nt, Artificial Sequence
  Description of Artificial Sequence: Synthetic oligonucleotide
aguggaagggguguauguacacc

SEQ ID NO: 762 - RNA, 23 nt, Artificial Sequence
  Description of Artificial Sequence: Synthetic oligonucleotide
agguggaagggguguauguacac

SEQ ID NO: 763 - RNA, 23 nt, Artificial Sequence
  Description of Artificial Sequence: Synthetic oligonucleotide
aagguggaagggguguauguaca

SEQ ID NO: 764 - RNA, 23 nt, Artificial Sequence
  Description of Artificial Sequence: Synthetic oligonucleotide
agagguggaagggguguauguac

SEQ ID NO: 765 - RNA, 23 nt, Artificial Sequence
  Description of Artificial Sequence: Synthetic oligonucleotide
acgagguggaagggguguaugua

SEQ ID NO: 766 - RNA, 23 nt, Artificial Sequence
  Description of Artificial Sequence: Synthetic oligonucleotide
aacgagguggaagggguguaugu

SEQ ID NO: 767 - RNA, 23 nt, Artificial Sequence
  Description of Artificial Sequence: Synthetic oligonucleotide
auggaugacgagguggaaggggu

SEQ ID NO: 768 - RNA, 23 nt, Artificial Sequence
  Description of Artificial Sequence: Synthetic oligonucleotide
aguggaugacgagguggaagggg

SEQ ID NO: 769 - RNA, 23 nt, Artificial Sequence
  Description of Artificial Sequence: Synthetic oligonucleotide
auguggaugacgagguggaaggg

SEQ ID NO: 770 - RNA, 23 nt, Artificial Sequence
  Description of Artificial Sequence: Synthetic oligonucleotide
auuguggaugacgagguggaagg

SEQ ID NO: 771 - RNA, 23 nt, Artificial Sequence
  Description of Artificial Sequence: Synthetic oligonucleotide
aauuguggaugacgagguggaag

SEQ ID NO: 772 - RNA, 23 nt, Artificial Sequence
  Description of Artificial Sequence: Synthetic oligonucleotide
acauuguggaugacgagguggaa

SEQ ID NO: 773 - RNA, 23 nt, Artificial Sequence
  Description of Artificial Sequence: Synthetic oligonucleotide
aucauuguggaugacgaggugga

SEQ ID NO: 774 - RNA, 23 nt, Artificial Sequence
  Description of Artificial Sequence: Synthetic oligonucleotide
aucucauuguggaugacgaggug

SEQ ID NO: 775 - RNA, 23 nt, Artificial Sequence
  Description of Artificial Sequence: Synthetic oligonucleotide
acucucauuguggaugacgaggu

SEQ ID NO: 776 - RNA, 23 nt, Artificial Sequence
  Description of Artificial Sequence: Synthetic oligonucleotide
aacucucauuguggaugacgagg

SEQ ID NO: 777 - RNA, 23 nt, Artificial Sequence
  Description of Artificial Sequence: Synthetic oligonucleotide
auacucucauuguggaugacgag

SEQ ID NO: 778 - RNA, 23 nt, Artificial Sequence
  Description of Artificial Sequence: Synthetic oligonucleotide
aguacucucauuguggaugacga

SEQ ID NO: 779 - RNA, 23 nt, Artificial Sequence
  Description of Artificial Sequence: Synthetic oligonucleotide
agguacucucauuguggaugacg

SEQ ID NO: 780 - RNA, 23 nt, Artificial Sequence
  Description of Artificial Sequence: Synthetic oligonucleotide
aagguacucucauuguggaugac

SEQ ID NO: 781 - RNA, 23 nt, Artificial Sequence
  Description of Artificial Sequence: Synthetic oligonucleotide
acagguacucucauuguggauga

SEQ ID NO: 782 - RNA, 23 nt, Artificial Sequence
  Description of Artificial Sequence: Synthetic oligonucleotide
aacagguacucucauuguggaug

SEQ ID NO: 783 - RNA, 23 nt, Artificial Sequence
  Description of Artificial Sequence: Synthetic oligonucleotide
acacagguacucucauuguggau

SEQ ID NO: 784 - RNA, 23 nt, Artificial Sequence
  Description of Artificial Sequence: Synthetic oligonucleotide
aucacagguacucucauugugga

SEQ ID NO: 785 - RNA, 23 nt, Artificial Sequence
  Description of Artificial Sequence: Synthetic oligonucleotide
acucacagguacucucauugugg

SEQ ID NO: 786 - RNA, 23 nt, Artificial Sequence
  Description of Artificial Sequence: Synthetic oligonucleotide
agcucacagguacucucauugug

SEQ ID NO: 787 - RNA, 23 nt, Artificial Sequence
  Description of Artificial Sequence: Synthetic oligonucleotide
augcucacagguacucucauugu

SEQ ID NO: 788 - RNA, 23 nt, Artificial Sequence
  Description of Artificial Sequence: Synthetic oligonucleotide
acugcucacagguacucucauug

SEQ ID NO: 789 - RNA, 23 nt, Artificial Sequence
  Description of Artificial Sequence: Synthetic oligonucleotide
agcugcucacagguacucucauu

SEQ ID NO: 790 - RNA, 23 nt, Artificial Sequence
  Description of Artificial Sequence: Synthetic oligonucleotide
aagcugcucacagguacucucau

SEQ ID NO: 791 - RNA, 23 nt, Artificial Sequence
  Description of Artificial Sequence: Synthetic oligonucleotide
acagcugcucacagguacucuca

SEQ ID NO: 792 - RNA, 23 nt, Artificial Sequence
  Description of Artificial Sequence: Synthetic oligonucleotide
accagcugcucacagguacucuc

SEQ ID NO: 793 - RNA, 23 nt, Artificial Sequence
  Description of Artificial Sequence: Synthetic oligonucleotide
agccagcugcucacagguacucu

SEQ ID NO: 794 - RNA, 23 nt, Artificial Sequence
  Description of Artificial Sequence: Synthetic oligonucleotide
augccagcugcucacagguacuc

SEQ ID NO: 795 - RNA, 23 nt, Artificial Sequence
  Description of Artificial Sequence: Synthetic oligonucleotide
auugccagcugcucacagguacu

SEQ ID NO: 796 - RNA, 23 nt, Artificial Sequence
  Description of Artificial Sequence: Synthetic oligonucleotide
auggccagcaucccgaccauugc

SEQ ID NO: 797 - RNA, 23 nt, Artificial Sequence
  Description of Artificial Sequence: Synthetic oligonucleotide
auuggccagcaucccgaccauug

SEQ ID NO: 798 - RNA, 23 nt, Artificial Sequence
  Description of Artificial Sequence: Synthetic oligonucleotide
aguuggccagcaucccgaccauu

SEQ ID NO: 799 - RNA, 23 nt, Artificial Sequence
  Description of Artificial Sequence: Synthetic oligonucleotide
aaguuggccagcaucccgaccau

SEQ ID NO: 800 - RNA, 23 nt, Artificial Sequence
  Description of Artificial Sequence: Synthetic oligonucleotide
aaaguuggccagcaucccgacca

SEQ ID NO: 801 - RNA, 23 nt, Artificial Sequence
  Description of Artificial Sequence: Synthetic oligonucleotide
agaaguuggccagcaucccgacc

SEQ ID NO: 802 - RNA, 23 nt, Artificial Sequence
  Description of Artificial Sequence: Synthetic oligonucleotide
aagaaguuggccagcaucccgac

SEQ ID NO: 803 - RNA, 23 nt, Artificial Sequence
  Description of Artificial Sequence: Synthetic oligonucleotide
aaagaaguuggccagcaucccga

SEQ ID NO: 804 - RNA, 23 nt, Artificial Sequence
  Description of Artificial Sequence: Synthetic oligonucleotide
acaagaaguuggccagcaucccg

SEQ ID NO: 805 - RNA, 23 nt, Artificial Sequence
  Description of Artificial Sequence: Synthetic oligonucleotide
accaagaaguuggccagcauccc

SEQ ID NO: 806 - RNA, 23 nt, Artificial Sequence
  Description of Artificial Sequence: Synthetic oligonucleotide
aagcccaagaaguuggccagcau

SEQ ID NO: 807 - RNA, 23 nt, Artificial Sequence
  Description of Artificial Sequence: Synthetic oligonucleotide
aaagcccaagaaguuggccagca

SEQ ID NO: 808 - RNA, 23 nt, Artificial Sequence
  Description of Artificial Sequence: Synthetic oligonucleotide
acggaagcccaagaaguuggcca

SEQ ID NO: 809 - RNA, 23 nt, Artificial Sequence
  Description of Artificial Sequence: Synthetic oligonucleotide
aacggaagcccaagaaguuggcc

SEQ ID NO: 810 - RNA, 23 nt, Artificial Sequence
  Description of Artificial Sequence: Synthetic oligonucleotide
auacggaagcccaagaaguuggc

SEQ ID NO: 811 - RNA, 23 nt, Artificial Sequence
  Description of Artificial Sequence: Synthetic oligonucleotide
aauacggaagcccaagaaguugg

SEQ ID NO: 812 - RNA, 23 nt, Artificial Sequence
  Description of Artificial Sequence: Synthetic oligonucleotide
auauacggaagcccaagaaguug

SEQ ID NO: 813 - RNA, 23 nt, Artificial Sequence
  Description of Artificial Sequence: Synthetic oligonucleotide
aauauacggaagcccaagaaguu

SEQ ID NO: 814 - RNA, 23 nt, Artificial Sequence
  Description of Artificial Sequence: Synthetic oligonucleotide
auauauacggaagcccaagaagu

SEQ ID NO: 815 - RNA, 23 nt, Artificial Sequence
  Description of Artificial Sequence: Synthetic oligonucleotide
aauauauacggaagcccaagaag

SEQ ID NO: 816 - RNA, 23 nt, Artificial Sequence
  Description of Artificial Sequence: Synthetic oligonucleotide
acauauauacggaagcccaagaa

SEQ ID NO: 817 - RNA, 23 nt, Artificial Sequence
  Description of Artificial Sequence: Synthetic oligonucleotide
accauauauacggaagcccaaga

SEQ ID NO: 818 - RNA, 23 nt, Artificial Sequence
  Description of Artificial Sequence: Synthetic oligonucleotide
augccauauauacggaagcccaa

SEQ ID NO: 819 - RNA, 23 nt, Artificial Sequence
  Description of Artificial Sequence: Synthetic oligonucleotide
aaugccauauauacggaagccca

SEQ ID NO: 820 - RNA, 23 nt, Artificial Sequence
  Description of Artificial Sequence: Synthetic oligonucleotide
acaugccauauauacggaagccc

SEQ ID NO: 821 - RNA, 23 nt, Artificial Sequence
  Description of Artificial Sequence: Synthetic oligonucleotide
acacugugcaugccauauauacg

SEQ ID NO: 822 - RNA, 23 nt, Artificial Sequence
  Description of Artificial Sequence: Synthetic oligonucleotide
aucacugugcaugccauauauac

SEQ ID NO: 823 - RNA, 23 nt, Artificial Sequence
  Description of Artificial Sequence: Synthetic oligonucleotide
acucacugugcaugccauauaua

SEQ ID NO: 824 - RNA, 23 nt, Artificial Sequence
  Description of Artificial Sequence: Synthetic oligonucleotide
agcucacugugcaugccauauau

SEQ ID NO: 825 - RNA, 23 nt, Artificial Sequence
  Description of Artificial Sequence: Synthetic oligonucleotide
aagcucacugugcaugccauaua

SEQ ID NO: 826 - RNA, 23 nt, Artificial Sequence
  Description of Artificial Sequence: Synthetic oligonucleotide
auagcucacugugcaugccauau

SEQ ID NO: 827 - RNA, 23 nt, Artificial Sequence
  Description of Artificial Sequence: Synthetic oligonucleotide
aauagcucacugugcaugccaua

SEQ ID NO: 828 - RNA, 23 nt, Artificial Sequence
  Description of Artificial Sequence: Synthetic oligonucleotide
acauagcucacugugcaugccau

SEQ ID NO: 829 - RNA, 23 nt, Artificial Sequence
  Description of Artificial Sequence: Synthetic oligonucleotide
accauagcucacugugcaugcca

SEQ ID NO: 830 - RNA, 23 nt, Artificial Sequence
  Description of Artificial Sequence: Synthetic oligonucleotide
acccauagcucacugugcaugcc

SEQ ID NO: 831 - RNA, 23 nt, Artificial Sequence
  Description of Artificial Sequence: Synthetic oligonucleotide
accccauagcucacugugcaugc

SEQ ID NO: 832 - RNA, 23 nt, Artificial Sequence
  Description of Artificial Sequence: Synthetic oligonucleotide
aagacagccguuggggagaggac

SEQ ID NO: 833 - RNA, 23 nt, Artificial Sequence
  Description of Artificial Sequence: Synthetic oligonucleotide
aagagagaggccagggugccaaa

SEQ ID NO: 834 - RNA, 23 nt, Artificial Sequence
  Description of Artificial Sequence: Synthetic oligonucleotide
auagagagaggccagggugccaa

SEQ ID NO: 835 - RNA, 23 nt, Artificial Sequence
  Description of Artificial Sequence: Synthetic oligonucleotide
aaggauugccuguagccugucag

SEQ ID NO: 836 - RNA, 23 nt, Artificial Sequence
  Description of Artificial Sequence: Synthetic oligonucleotide
acaggauugccuguagccuguca

SEQ ID NO: 837 - RNA, 23 nt, Artificial Sequence
  Description of Artificial Sequence: Synthetic oligonucleotide
aguucuuguccuuccaaggaaca

SEQ ID NO: 838 - RNA, 23 nt, Artificial Sequence
  Description of Artificial Sequence: Synthetic oligonucleotide
acaguucuuguccuuccaaggaa

SEQ ID NO: 839 - RNA, 23 nt, Artificial Sequence
  Description of Artificial Sequence: Synthetic oligonucleotide
agcaguucuuguccuuccaagga

SEQ ID NO: 840 - RNA, 23 nt, Artificial Sequence
  Description of Artificial Sequence: Synthetic oligonucleotide
aacaaacggcugcuucaggugca

SEQ ID NO: 841 - RNA, 23 nt, Artificial Sequence
  Description of Artificial Sequence: Synthetic oligonucleotide
augcacaaacggcugcuucaggu

SEQ ID NO: 842 - RNA, 23 nt, Artificial Sequence
  Description of Artificial Sequence: Synthetic oligonucleotide
aagagccaggcccugcacaaacg

SEQ ID NO: 843 - RNA, 23 nt, Artificial Sequence
  Description of Artificial Sequence: Synthetic oligonucleotide
agagagccaggcccugcacaaac

SEQ ID NO: 844 - RNA, 23 nt, Artificial Sequence
  Description of Artificial Sequence: Synthetic oligonucleotide
aagagagccaggcccugcacaaa

SEQ ID NO: 845 - RNA, 23 nt, Artificial Sequence
  Description of Artificial Sequence: Synthetic oligonucleotide
auagagagccaggcccugcacaa

SEQ ID NO: 846 - RNA, 23 nt, Artificial Sequence
  Description of Artificial Sequence: Synthetic oligonucleotide
aauagagagccaggcccugcaca

SEQ ID NO: 847 - RNA, 23 nt, Artificial Sequence
  Description of Artificial Sequence: Synthetic oligonucleotide
acugugaaguccagagagcgugg

SEQ ID NO: 848 - RNA, 23 nt, Artificial Sequence
  Description of Artificial Sequence: Synthetic oligonucleotide
aucugugaaguccagagagcgug

SEQ ID NO: 849 - RNA, 23 nt, Artificial Sequence
  Description of Artificial Sequence: Synthetic oligonucleotide
agaaccugucaaucuucucagca

SEQ ID NO: 850 - RNA, 23 nt, Artificial Sequence
  Description of Artificial Sequence: Synthetic oligonucleotide
augaaccugucaaucuucucagc

SEQ ID NO: 851 - RNA, 23 nt, Artificial Sequence
  Description of Artificial Sequence: Synthetic oligonucleotide
aaugaaccugucaaucuucucag

SEQ ID NO: 852 - RNA, 23 nt, Artificial Sequence
  Description of Artificial Sequence: Synthetic oligonucleotide
acaugaaccugucaaucuucuca

SEQ ID NO: 853 - RNA, 23 nt, Artificial Sequence
  Description of Artificial Sequence: Synthetic oligonucleotide
agcaugaaccugucaaucuucuc

SEQ ID NO: 854 - RNA, 23 nt, Artificial Sequence
  Description of Artificial Sequence: Synthetic oligonucleotide
augcaugaaccugucaaucuucu

SEQ ID NO: 855 - RNA, 23 nt, Artificial Sequence
  Description of Artificial Sequence: Synthetic oligonucleotide
acugcaugaaccugucaaucuuc

SEQ ID NO: 856 - RNA, 23 nt, Artificial Sequence
  Description of Artificial Sequence: Synthetic oligonucleotide
accugcaugaaccugucaaucuu

SEQ ID NO: 857 - RNA, 23 nt, Artificial Sequence
  Description of Artificial Sequence: Synthetic oligonucleotide
agccugcaugaaccugucaaucu

SEQ ID NO: 858 - RNA, 23 nt, Artificial Sequence
  Description of Artificial Sequence: Synthetic oligonucleotide
aagccugcaugaaccugucaauc

SEQ ID NO: 859 - RNA, 23 nt, Artificial Sequence
  Description of Artificial Sequence: Synthetic oligonucleotide
acagccugcaugaaccugucaau

SEQ ID NO: 860 - RNA, 23 nt, Artificial Sequence
  Description of Artificial Sequence: Synthetic oligonucleotide
aacagccugcaugaaccugucaa

SEQ ID NO: 861 - RNA, 23 nt, Artificial Sequence
  Description of Artificial Sequence: Synthetic oligonucleotide
acacagccugcaugaaccuguca

SEQ ID NO: 862 - RNA, 23 nt, Artificial Sequence
  Description of Artificial Sequence: Synthetic oligonucleotide
acauccugucacagccugcauga

SEQ ID NO: 863 - RNA, 23 nt, Artificial Sequence
  Description of Artificial Sequence: Synthetic oligonucleotide
auccauccugucacagccugcau

SEQ ID NO: 864 - RNA, 23 nt, Artificial Sequence
  Description of Artificial Sequence: Synthetic oligonucleotide
auuccauccugucacagccugca

SEQ ID NO: 865 - RNA, 23 nt, Artificial Sequence
  Description of Artificial Sequence: Synthetic oligonucleotide
auggacguagguguugaaagcca

SEQ ID NO: 866 - RNA, 23 nt, Artificial Sequence
  Description of Artificial Sequence: Synthetic oligonucleotide
acuguuguccacccagaacuccu

SEQ ID NO: 867 - RNA, 23 nt, Artificial Sequence
  Description of Artificial Sequence: Synthetic oligonucleotide
aacacugaggugcuguuguccac

SEQ ID NO: 868 - RNA, 23 nt, Artificial Sequence
  Description of Artificial Sequence: Synthetic oligonucleotide
agacacugaggugcuguugucca

SEQ ID NO: 869 - RNA, 23 nt, Artificial Sequence
  Description of Artificial Sequence: Synthetic oligonucleotide
aagacacugaggugcuguugucc

SEQ ID NO: 870 - RNA, 23 nt, Artificial Sequence
  Description of Artificial Sequence: Synthetic oligonucleotide
acagacacugaggugcuguuguc

SEQ ID NO: 871 - RNA, 23 nt, Artificial Sequence
  Description of Artificial Sequence: Synthetic oligonucleotide
aacagacacugaggugcuguugu

SEQ ID NO: 872 - RNA, 23 nt, Artificial Sequence
  Description of Artificial Sequence: Synthetic oligonucleotide
acuuguccaggucagaggcauag

SEQ ID NO: 873 - RNA, 23 nt, Artificial Sequence
  Description of Artificial Sequence: Synthetic oligonucleotide
aaaagugagacccuccaccuugu

SEQ ID NO: 874 - RNA, 23 nt, Artificial Sequence
  Description of Artificial Sequence: Synthetic oligonucleotide
agaaagugagacccuccaccuug

SEQ ID NO: 875 - RNA, 23 nt, Artificial Sequence
  Description of Artificial Sequence: Synthetic oligonucleotide
aggaaagugagacccuccaccuu

SEQ ID NO: 876 - RNA, 23 nt, Artificial Sequence
  Description of Artificial Sequence: Synthetic oligonucleotide
augcuggaaagugagacccucca

SEQ ID NO: 877 - RNA, 23 nt, Artificial Sequence
  Description of Artificial Sequence: Synthetic oligonucleotide
auugcuggaaagugagacccucc

SEQ ID NO: 878 - RNA, 23 nt, Artificial Sequence
  Description of Artificial Sequence: Synthetic oligonucleotide
auuuugcuggaaagugagacccu

SEQ ID NO: 879 - RNA, 23 nt, Artificial Sequence
  Description of Artificial Sequence: Synthetic oligonucleotide
aguuuugcuggaaagugagaccc

SEQ ID NO: 880 - RNA, 23 nt, Artificial Sequence
  Description of Artificial Sequence: Synthetic oligonucleotide
aaguuuugcuggaaagugagacc

SEQ ID NO: 881 - RNA, 23 nt, Artificial Sequence
  Description of Artificial Sequence: Synthetic oligonucleotide
agaguuuugcuggaaagugagac

SEQ ID NO: 882 - RNA, 23 nt, Artificial Sequence
  Description of Artificial Sequence: Synthetic oligonucleotide
aggaguuuugcuggaaagugaga

SEQ ID NO: 883 - RNA, 23 nt, Artificial Sequence
  Description of Artificial Sequence: Synthetic oligonucleotide
agggaguuuugcuggaaagugag

SEQ ID NO: 884 - RNA, 23 nt, Artificial Sequence
  Description of Artificial Sequence: Synthetic oligonucleotide
aagggaguuuugcuggaaaguga

SEQ ID NO: 885 - RNA, 23 nt, Artificial Sequence
  Description of Artificial Sequence: Synthetic oligonucleotide
agagggaguuuugcuggaaagug

SEQ ID NO: 886 - RNA, 23 nt, Artificial Sequence
  Description of Artificial Sequence: Synthetic oligonucleotide
augagggaguuuugcuggaaagu

SEQ ID NO: 887 - RNA, 23 nt, Artificial Sequence
  Description of Artificial Sequence: Synthetic oligonucleotide
auugagggaguuuugcuggaaag

SEQ ID NO: 888 - RNA, 23 nt, Artificial Sequence
  Description of Artificial Sequence: Synthetic oligonucleotide
aguugagggaguuuugcuggaaa

SEQ ID NO: 889 - RNA, 23 nt, Artificial Sequence
  Description of Artificial Sequence: Synthetic oligonucleotide
aaguugagggaguuuugcuggaa

SEQ ID NO: 890 - RNA, 23 nt, Artificial Sequence
  Description of Artificial Sequence: Synthetic oligonucleotide
acaguugagggaguuuugcugga

SEQ ID NO: 891 - RNA, 23 nt, Artificial Sequence
  Description of Artificial Sequence: Synthetic oligonucleotide
accaguugagggaguuuugcugg

SEQ ID NO: 892 - RNA, 23 nt, Artificial Sequence
  Description of Artificial Sequence: Synthetic oligonucleotide
auccaguugagggaguuuugcug

SEQ ID NO: 893 - RNA, 23 nt, Artificial Sequence
  Description of Artificial Sequence: Synthetic oligonucleotide
aauccaguugagggaguuuugcu

SEQ ID NO: 894 - RNA, 23 nt, Artificial Sequence
  Description of Artificial Sequence: Synthetic oligonucleotide
acauccaguugagggaguuuugc

SEQ ID NO: 895 - RNA, 23 nt, Artificial Sequence
  Description of Artificial Sequence: Synthetic oligonucleotide
aucauccaguugagggaguuuug

SEQ ID NO: 896 - RNA, 23 nt, Artificial Sequence
  Description of Artificial Sequence: Synthetic oligonucleotide
auucauccaguugagggaguuuu

SEQ ID NO: 897 - RNA, 23 nt, Artificial Sequence
  Description of Artificial Sequence: Synthetic oligonucleotide
acuucauccaguugagggaguuu

SEQ ID NO: 898 - RNA, 23 nt, Artificial Sequence
  Description of Artificial Sequence: Synthetic oligonucleotide
aucuucauccaguugagggaguu

SEQ ID NO: 899 - RNA, 23 nt, Artificial Sequence
  Description of Artificial Sequence: Synthetic oligonucleotide
auucuucauccaguugagggagu

SEQ ID NO: 900 - RNA, 23 nt, Artificial Sequence
  Description of Artificial Sequence: Synthetic oligonucleotide
auuucuucauccaguugagggag

SEQ ID NO: 901 - RNA, 23 nt, Artificial Sequence
  Description of Artificial Sequence: Synthetic oligonucleotide
aguuucuucauccaguugaggga

SEQ ID NO: 902 - RNA, 23 nt, Artificial Sequence
  Description of Artificial Sequence: Synthetic oligonucleotide
aaguuucuucauccaguugaggg

SEQ ID NO: 903 - RNA, 23 nt, Artificial Sequence
  Description of Artificial Sequence: Synthetic oligonucleotide
accugcaggucauaagauccuug

SEQ ID NO: 904 - RNA, 23 nt, Artificial Sequence
  Description of Artificial Sequence: Synthetic oligonucleotide
acagguccugcaggucauaagau

SEQ ID NO: 905 - RNA, 23 nt, Artificial Sequence
  Description of Artificial Sequence: Synthetic oligonucleotide
aauuuuugcagguucagcucggu

SEQ ID NO: 906 - RNA, 23 nt, Artificial Sequence
  Description of Artificial Sequence: Synthetic oligonucleotide
aaauuuuugcagguucagcucgg

SEQ ID NO: 907 - RNA, 23 nt, Artificial Sequence
  Description of Artificial Sequence: Synthetic oligonucleotide
acaauuuuugcagguucagcucg

SEQ ID NO: 908 - RNA, 23 nt, Artificial Sequence
  Description of Artificial Sequence: Synthetic oligonucleotide
aucaauuuuugcagguucagcuc

SEQ ID NO: 909 - RNA, 23 nt, Artificial Sequence
  Description of Artificial Sequence: Synthetic oligonucleotide
acucaauuuuugcagguucagcu

SEQ ID NO: 910 - RNA, 23 nt, Artificial Sequence
  Description of Artificial Sequence: Synthetic oligonucleotide
agcucaauuuuugcagguucagc

SEQ ID NO: 911 - RNA, 23 nt, Artificial Sequence
  Description of Artificial Sequence: Synthetic oligonucleotide
augcucaauuuuugcagguucag

SEQ ID NO: 912 - RNA, 23 nt, Artificial Sequence
  Description of Artificial Sequence: Synthetic oligonucleotide
auugcucaauuuuugcagguuca

SEQ ID NO: 913 - RNA, 23 nt, Artificial Sequence
  Description of Artificial Sequence: Synthetic oligonucleotide
aauugcucaauuuuugcagguuc

SEQ ID NO: 914 - RNA, 23 nt, Artificial Sequence
  Description of Artificial Sequence: Synthetic oligonucleotide
acauugcucaauuuuugcagguu

SEQ ID NO: 915 - RNA, 23 nt, Artificial Sequence
  Description of Artificial Sequence: Synthetic oligonucleotide
aucauugcucaauuuuugcaggu

SEQ ID NO: 916 - RNA, 23 nt, Artificial Sequence
  Description of Artificial Sequence: Synthetic oligonucleotide
agucauugcucaauuuuugcagg

SEQ ID NO: 917 - RNA, 23 nt, Artificial Sequence
  Description of Artificial Sequence: Synthetic oligonucleotide
aaaaaugcuguucagcaccuccc

SEQ ID NO: 918 - RNA, 23 nt, Artificial Sequence
  Description of Artificial Sequence: Synthetic oligonucleotide
aaaaaaugcuguucagcaccucc

SEQ ID NO: 919 - RNA, 23 nt, Artificial Sequence
  Description of Artificial Sequence: Synthetic oligonucleotide
aaaaaaaugcuguucagcaccuc

SEQ ID NO: 920 - RNA, 23 nt, Artificial Sequence
  Description of Artificial Sequence: Synthetic oligonucleotide
aaaaaaaaugcuguucagcaccu

SEQ ID NO: 921 - RNA, 23 nt, Artificial Sequence
  Description of Artificial Sequence: Synthetic oligonucleotide
aaaaaaaaaugcuguucagcacc

SEQ ID NO: 922 - RNA, 23 nt, Artificial Sequence
  Description of Artificial Sequence: Synthetic oligonucleotide
acaaaaaaaaugcuguucagcac

SEQ ID NO: 923 - RNA, 23 nt, Artificial Sequence
  Description of Artificial Sequence: Synthetic oligonucleotide
aucaaaaaaaaugcuguucagca

SEQ ID NO: 924 - RNA, 23 nt, Artificial Sequence
  Description of Artificial Sequence: Synthetic oligonucleotide
aacucugugggcucucucucauc

SEQ ID NO: 925 - RNA, 23 nt, Artificial Sequence
  Description of Artificial Sequence: Synthetic oligonucleotide
aagacucugugggcucucucuca

SEQ ID NO: 926 - RNA, 23 nt, Artificial Sequence
  Description of Artificial Sequence: Synthetic oligonucleotide
auagacucugugggcucucucuc

SEQ ID NO: 927 - RNA, 23 nt, Artificial Sequence
  Description of Artificial Sequence: Synthetic oligonucleotide
acaaacaggaaugggcgguucag

SEQ ID NO: 928 - RNA, 23 nt, Artificial Sequence
  Description of Artificial Sequence: Synthetic oligonucleotide
agcaaacaggaaugggcgguuca

SEQ ID NO: 929 - RNA, 23 nt, Artificial Sequence
  Description of Artificial Sequence: Synthetic oligonucleotide
aagcaaacaggaaugggcgguuc

SEQ ID NO: 930 - RNA, 23 nt, Artificial Sequence
  Description of Artificial Sequence: Synthetic oligonucleotide
acagcaaacaggaaugggcgguu

SEQ ID NO: 931 - RNA, 23 nt, Artificial Sequence
  Description of Artificial Sequence: Synthetic oligonucleotide
aacagcaaacaggaaugggcggu

SEQ ID NO: 932 - RNA, 23 nt, Artificial Sequence
  Description of Artificial Sequence: Synthetic oligonucleotide
acacagcaaacaggaaugggcgg

SEQ ID NO: 933 - RNA, 23 nt, Artificial Sequence
  Description of Artificial Sequence: Synthetic oligonucleotide
aacacagcaaacaggaaugggcg

SEQ ID NO: 934 - RNA, 23 nt, Artificial Sequence
  Description of Artificial Sequence: Synthetic oligonucleotide
auacacagcaaacaggaaugggc

SEQ ID NO: 935 - RNA, 23 nt, Artificial Sequence
  Description of Artificial Sequence: Synthetic oligonucleotide
aauacacagcaaacaggaauggg

SEQ ID NO: 936 - RNA, 23 nt, Artificial Sequence
  Description of Artificial Sequence: Synthetic oligonucleotide
acauacacagcaaacaggaaugg

SEQ ID NO: 937 - RNA, 23 nt, Artificial Sequence
  Description of Artificial Sequence: Synthetic oligonucleotide
aucauacacagcaaacaggaaug

SEQ ID NO: 938 - RNA, 23 nt, Artificial Sequence
  Description of Artificial Sequence: Synthetic oligonucleotide
aaucauacacagcaaacaggaau

SEQ ID NO: 939 - RNA, 23 nt, Artificial Sequence
  Description of Artificial Sequence: Synthetic oligonucleotide
agaucauacacagcaaacaggaa

SEQ ID NO: 940 - RNA, 23 nt, Artificial Sequence
  Description of Artificial Sequence: Synthetic oligonucleotide
augaucauacacagcaaacagga

SEQ ID NO: 941 - RNA, 23 nt, Artificial Sequence
  Description of Artificial Sequence: Synthetic oligonucleotide
auugaucauacacagcaaacagg

SEQ ID NO: 942 - RNA, 23 nt, Artificial Sequence
  Description of Artificial Sequence: Synthetic oligonucleotide
auuugaucauacacagcaaacag

SEQ ID NO: 943 - RNA, 23 nt, Artificial Sequence
  Description of Artificial Sequence: Synthetic oligonucleotide
acuuugaucauacacagcaaaca

SEQ ID NO: 944 - RNA, 23 nt, Artificial Sequence
  Description of Artificial Sequence: Synthetic oligonucleotide
agaaaaggugggagacugggggu

SEQ ID NO: 945 - RNA, 23 nt, Artificial Sequence
  Description of Artificial Sequence: Synthetic oligonucleotide
aagaaaaggugggagacuggggg

SEQ ID NO: 946 - RNA, 23 nt, Artificial Sequence
  Description of Artificial Sequence: Synthetic oligonucleotide
aaagaaaaggugggagacugggg

SEQ ID NO: 947 - RNA, 23 nt, Artificial Sequence
  Description of Artificial Sequence: Synthetic oligonucleotide
aagaagaaaaggugggagacugg

SEQ ID NO: 948 - RNA, 23 nt, Artificial Sequence
  Description of Artificial Sequence: Synthetic oligonucleotide
auagaagaaaaggugggagacug

SEQ ID NO: 949 - RNA, 23 nt, Artificial Sequence
  Description of Artificial Sequence: Synthetic oligonucleotide
auuagaagaaaaggugggagacu

SEQ ID NO: 950 - RNA, 23 nt, Artificial Sequence
  Description of Artificial Sequence: Synthetic oligonucleotide
aauuagaagaaaaggugggagac

SEQ ID NO: 951 - RNA, 23 nt, Artificial Sequence
  Description of Artificial Sequence: Synthetic oligonucleotide
acauuagaagaaaaggugggaga

SEQ ID NO: 952 - RNA, 23 nt, Artificial Sequence
  Description of Artificial Sequence: Synthetic oligonucleotide
aucauuagaagaaaaggugggag

SEQ ID NO: 953 - RNA, 23 nt, Artificial Sequence
  Description of Artificial Sequence: Synthetic oligonucleotide
acucauuagaagaaaagguggga

SEQ ID NO: 954 - RNA, 23 nt, Artificial Sequence
  Description of Artificial Sequence: Synthetic oligonucleotide
aacucauuagaagaaaagguggg

SEQ ID NO: 955 - RNA, 23 nt, Artificial Sequence
  Description of Artificial Sequence: Synthetic oligonucleotide
agacucauuagaagaaaaggugg

SEQ ID NO: 956 - RNA, 23 nt, Artificial Sequence
  Description of Artificial Sequence: Synthetic oligonucleotide
acuuagaccaaggagaaacggcu

SEQ ID NO: 957 - RNA, 23 nt, Artificial Sequence
  Description of Artificial Sequence: Synthetic oligonucleotide
aacuuagaccaaggagaaacggc

SEQ ID NO: 958 - RNA, 23 nt, Artificial Sequence
  Description of Artificial Sequence: Synthetic oligonucleotide
acacuuagaccaaggagaaacgg

SEQ ID NO: 959 - RNA, 23 nt, Artificial Sequence
  Description of Artificial Sequence: Synthetic oligonucleotide
acuaaaauaaacccagcaaacug

SEQ ID NO: 960 - RNA, 23 nt, Artificial Sequence
  Description of Artificial Sequence: Synthetic oligonucleotide
aucuaaaauaaacccagcaaacu

SEQ ID NO: 961 - RNA, 23 nt, Artificial Sequence
  Description of Artificial Sequence: Synthetic oligonucleotide
acucuaaaauaaacccagcaaac

SEQ ID NO: 962 - RNA, 23 nt, Artificial Sequence
  Description of Artificial Sequence: Synthetic oligonucleotide
aucucuaaaauaaacccagcaaa

SEQ ID NO: 963 - RNA, 23 nt, Artificial Sequence
  Description of Artificial Sequence: Synthetic oligonucleotide
auucucuaaaauaaacccagcaa

SEQ ID NO: 964 - RNA, 23 nt, Artificial Sequence
  Description of Artificial Sequence: Synthetic oligonucleotide
aauucucuaaaauaaacccagca

SEQ ID NO: 965 - RNA, 23 nt, Artificial Sequence
  Description of Artificial Sequence: Synthetic oligonucleotide
acauucucuaaaauaaacccagc

SEQ ID NO: 966 - RNA, 23 nt, Artificial Sequence
  Description of Artificial Sequence: Synthetic oligonucleotide
accauucucuaaaauaaacccag

SEQ ID NO: 967 - RNA, 23 nt, Artificial Sequence
  Description of Artificial Sequence: Synthetic oligonucleotide
acccauucucuaaaauaaaccca

SEQ ID NO: 968 - RNA, 23 nt, Artificial Sequence
  Description of Artificial Sequence: Synthetic oligonucleotide
accccauucucuaaaauaaaccc

SEQ ID NO: 969 - RNA, 23 nt, Artificial Sequence
  Description of Artificial Sequence: Synthetic oligonucleotide
acccccauucucuaaaauaaacc

SEQ ID NO: 970 - RNA, 23 nt, Artificial Sequence
  Description of Artificial Sequence: Synthetic oligonucleotide
augccuccccacccccauucucu

SEQ ID NO: 971 - RNA, 23 nt, Artificial Sequence
  Description of Artificial Sequence: Synthetic oligonucleotide
auugccuccccacccccauucuc

SEQ ID NO: 972 - RNA, 23 nt, Artificial Sequence
  Description of Artificial Sequence: Synthetic oligonucleotide
acuugccuccccacccccauucu

SEQ ID NO: 973 - RNA, 23 nt, Artificial Sequence
  Description of Artificial Sequence: Synthetic oligonucleotide
aucuugccuccccacccccauuc

SEQ ID NO: 974 - RNA, 23 nt, Artificial Sequence
  Description of Artificial Sequence: Synthetic oligonucleotide
auucuugccuccccacccccauu

SEQ ID NO: 975 - RNA, 23 nt, Artificial Sequence
  Description of Artificial Sequence: Synthetic oligonucleotide
aguucuugccuccccacccccau

SEQ ID NO: 976 - RNA, 23 nt, Artificial Sequence
  Description of Artificial Sequence: Synthetic oligonucleotide
aacugguucuugccuccccaccc

SEQ ID NO: 977 - RNA, 23 nt, Artificial Sequence
  Description of Artificial Sequence: Synthetic oligonucleotide
acacugguucuugccuccccacc

SEQ ID NO: 978 - RNA, 23 nt, Artificial Sequence
  Description of Artificial Sequence: Synthetic oligonucleotide
aacacugguucuugccuccccac

SEQ ID NO: 979 - RNA, 23 nt, Artificial Sequence
  Description of Artificial Sequence: Synthetic oligonucleotide
aaacacugguucuugccucccca

SEQ ID NO: 980 - RNA, 23 nt, Artificial Sequence
  Description of Artificial Sequence: Synthetic oligonucleotide
aaaacacugguucuugccucccc

SEQ ID NO: 981 - RNA, 23 nt, Artificial Sequence
  Description of Artificial Sequence: Synthetic oligonucleotide
auaaacacugguucuugccuccc

SEQ ID NO: 982 - RNA, 23 nt, Artificial Sequence
  Description of Artificial Sequence: Synthetic oligonucleotide
acuaaacacugguucuugccucc

SEQ ID NO: 983 - RNA, 23 nt, Artificial Sequence
  Description of Artificial Sequence: Synthetic oligonucleotide
agcuaaacacugguucuugccuc

SEQ ID NO: 984 - RNA, 23 nt, Artificial Sequence
  Description of Artificial Sequence: Synthetic oligonucleotide
acgcuaaacacugguucuugccu

SEQ ID NO: 985 - RNA, 23 nt, Artificial Sequence
  Description of Artificial Sequence: Synthetic oligonucleotide
agcgcuaaacacugguucuugcc

SEQ ID NO: 986 - RNA, 23 nt, Artificial Sequence
  Description of Artificial Sequence: Synthetic oligonucleotide
acgcgcuaaacacugguucuugc

SEQ ID NO: 987 - RNA, 23 nt, Artificial Sequence
  Description of Artificial Sequence: Synthetic oligonucleotide
accgcgcuaaacacugguucuug

SEQ ID NO: 988 - RNA, 23 nt, Artificial Sequence
  Description of Artificial Sequence: Synthetic oligonucleotide
acccgcgcuaaacacugguucuu

SEQ ID NO: 989 - RNA, 23 nt, Artificial Sequence
  Description of Artificial Sequence: Synthetic oligonucleotide
aucccgcgcuaaacacugguucu

SEQ ID NO: 990 - RNA, 23 nt, Artificial Sequence
  Description of Artificial Sequence: Synthetic oligonucleotide
auggaauucuuuuuggaacagua

SEQ ID NO: 991 - RNA, 23 nt, Artificial Sequence
  Description of Artificial Sequence: Synthetic oligonucleotide
aguuggaauucuuuuuggaacag

SEQ ID NO: 992 - RNA, 23 nt, Artificial Sequence
  Description of Artificial Sequence: Synthetic oligonucleotide
acgguuggaauucuuuuuggaac

SEQ ID NO: 993 - RNA, 23 nt, Artificial Sequence
  Description of Artificial Sequence: Synthetic oligonucleotide
aucgguuggaauucuuuuuggaa

SEQ ID NO: 994 - RNA, 23 nt, Artificial Sequence
  Description of Artificial Sequence: Synthetic oligonucleotide
agucgguuggaauucuuuuugga

SEQ ID NO: 995 - RNA, 23 nt, Artificial Sequence
  Description of Artificial Sequence: Synthetic oligonucleotide
aggucgguuggaauucuuuuugg

SEQ ID NO: 996 - RNA, 23 nt, Artificial Sequence
  Description of Artificial Sequence: Synthetic oligonucleotide
auggucgguuggaauucuuuuug

SEQ ID NO: 997 - RNA, 23 nt, Artificial Sequence
  Description of Artificial Sequence: Synthetic oligonucleotide
acuggucgguuggaauucuuuuu

SEQ ID NO: 998 - RNA, 23 nt, Artificial Sequence
  Description of Artificial Sequence: Synthetic oligonucleotide
agcuggucgguuggaauucuuuu

SEQ ID NO: 999 - RNA, 23 nt, Artificial Sequence
  Description of Artificial Sequence: Synthetic oligonucleotide
aagcuggucgguuggaauucuuu

SEQ ID NO: 1000 - RNA, 23 nt, Artificial Sequence
  Description of Artificial Sequence: Synthetic oligonucleotide
aaagcuggucgguuggaauucuu

SEQ ID NO: 1001 - RNA, 23 nt, Artificial Sequence
  Description of Artificial Sequence: Synthetic oligonucleotide
acaagcuggucgguuggaauucu

SEQ ID NO: 1002 - RNA, 23 nt, Artificial Sequence
  Description of Artificial Sequence: Synthetic oligonucleotide
aacaagcuggucgguuggaauuc

SEQ ID NO: 1003 - RNA, 23 nt, Artificial Sequence
  Description of Artificial Sequence: Synthetic oligonucleotide
aaacaagcuggucgguuggaauu

SEQ ID NO: 1004 - RNA, 23 nt, Artificial Sequence
  Description of Artificial Sequence: Synthetic oligonucleotide
aaaacaagcuggucgguuggaau

SEQ ID NO: 1005 - RNA, 23 nt, Artificial Sequence
  Description of Artificial Sequence: Synthetic oligonucleotide
acaaacaagcuggucgguuggaa

SEQ ID NO: 1006 - RNA, 23 nt, Artificial Sequence
  Description of Artificial Sequence: Synthetic oligonucleotide
aacaaacaagcuggucgguugga

SEQ ID NO: 1007 - RNA, 23 nt, Artificial Sequence
  Description of Artificial Sequence: Synthetic oligonucleotide
acacaaacaagcuggucgguugg

SEQ ID NO: 1008 - RNA, 23 nt, Artificial Sequence
  Description of Artificial Sequence: Synthetic oligonucleotide
aucacaaacaagcuggucgguug

SEQ ID NO: 1009 - RNA, 23 nt, Artificial Sequence
  Description of Artificial Sequence: Synthetic oligonucleotide
auucacaaacaagcuggucgguu

SEQ ID NO: 1010 - RNA, 23 nt, Artificial Sequence
  Description of Artificial Sequence: Synthetic oligonucleotide
auuucacaaacaagcuggucggu

SEQ ID NO: 1011 - RNA, 23 nt, Artificial Sequence
  Description of Artificial Sequence: Synthetic oligonucleotide
aguuucacaaacaagcuggucgg

SEQ ID NO: 1012 - RNA, 23 nt, Artificial Sequence
  Description of Artificial Sequence: Synthetic oligonucleotide
auguuucacaaacaagcuggucg

SEQ ID NO: 1013 - RNA, 23 nt, Artificial Sequence
  Description of Artificial Sequence: Synthetic oligonucleotide
auuguuucacaaacaagcugguc

SEQ ID NO: 1014 - RNA, 23 nt, Artificial Sequence
  Description of Artificial Sequence: Synthetic oligonucleotide
auuuguuucacaaacaagcuggu

SEQ ID NO: 1015 - RNA, 23 nt, Artificial Sequence
  Description of Artificial Sequence: Synthetic oligonucleotide
auuuuguuucacaaacaagcugg

SEQ ID NO: 1016 - RNA, 23 nt, Artificial Sequence
  Description of Artificial Sequence: Synthetic oligonucleotide
auuuuuguuucacaaacaagcug

SEQ ID NO: 1017 - RNA, 23 nt, Artificial Sequence
  Description of Artificial Sequence: Synthetic oligonucleotide
auuuuuuguuucacaaacaagcu

SEQ ID NO: 1018 - RNA, 23 nt, Artificial Sequence
  Description of Artificial Sequence: Synthetic oligonucleotide
acuuuuuuguuucacaaacaagc

SEQ ID NO: 1019 - RNA, 23 nt, Artificial Sequence
  Description of Artificial Sequence: Synthetic oligonucleotide
acucaacuugaaaagggaacacu

SEQ ID NO: 1020 - RNA, 23 nt, Artificial Sequence
  Description of Artificial Sequence: Synthetic oligonucleotide
aucucaacuugaaaagggaacac

SEQ ID NO: 1021 - RNA, 23 nt, Artificial Sequence
  Description of Artificial Sequence: Synthetic oligonucleotide
auucucaacuugaaaagggaaca

SEQ ID NO: 1022 - RNA, 23 nt, Artificial Sequence
  Description of Artificial Sequence: Synthetic oligonucleotide
acaauuuuuguucucaacuugaa

SEQ ID NO: 1023 - RNA, 23 nt, Artificial Sequence
  Description of Artificial Sequence: Synthetic oligonucleotide
accaauuuuuguucucaacuuga

SEQ ID NO: 1024 - RNA, 23 nt, Artificial Sequence
  Description of Artificial Sequence: Synthetic oligonucleotide
acccaauuuuuguucucaacuug

SEQ ID NO: 1025 - RNA, 23 nt, Artificial Sequence
  Description of Artificial Sequence: Synthetic oligonucleotide
aacccaauuuuuguucucaacuu

SEQ ID NO: 1026 - RNA, 23 nt, Artificial Sequence
  Description of Artificial Sequence: Synthetic oligonucleotide
aaacccaauuuuuguucucaacu

SEQ ID NO: 1027 - RNA, 23 nt, Artificial Sequence
  Description of Artificial Sequence: Synthetic oligonucleotide
aaaacccaauuuuuguucucaac

SEQ ID NO: 1028 - RNA, 23 nt, Artificial Sequence
  Description of Artificial Sequence: Synthetic oligonucleotide
aaaaacccaauuuuuguucucaa

SEQ ID NO: 1029 - RNA, 23 nt, Artificial Sequence
  Description of Artificial Sequence: Synthetic oligonucleotide
auaaaacccaauuuuuguucuca

SEQ ID NO: 1030 - RNA, 23 nt, Artificial Sequence
  Description of Artificial Sequence: Synthetic oligonucleotide
auuaaaacccaauuuuuguucuc

SEQ ID NO: 1031 - RNA, 23 nt, Artificial Sequence
  Description of Artificial Sequence: Synthetic oligonucleotide
agcaaugcaaaaauguauacuuu

SEQ ID NO: 1032 - RNA, 23 nt, Artificial Sequence
  Description of Artificial Sequence: Synthetic oligonucleotide
aggcaaugcaaaaauguauacuu

SEQ ID NO: 1033 - RNA, 23 nt, Artificial Sequence
  Description of Artificial Sequence: Synthetic oligonucleotide
aaggcaaugcaaaaauguauacu

SEQ ID NO: 1034 - RNA, 23 nt, Artificial Sequence
  Description of Artificial Sequence: Synthetic oligonucleotide
aaaggcaaugcaaaaauguauac

SEQ ID NO: 1035 - RNA, 23 nt, Artificial Sequence
  Description of Artificial Sequence: Synthetic oligonucleotide
aaccgaaggcaaugcaaaaaugu

SEQ ID NO: 1036 - RNA, 23 nt, Artificial Sequence
  Description of Artificial Sequence: Synthetic oligonucleotide
aaaccgaaggcaaugcaaaaaug

SEQ ID NO: 1037 - RNA, 23 nt, Artificial Sequence
  Description of Artificial Sequence: Synthetic oligonucleotide
aaaaccgaaggcaaugcaaaaau

SEQ ID NO: 1038 - RNA, 23 nt, Artificial Sequence
  Description of Artificial Sequence: Synthetic oligonucleotide
acaaaccgaaggcaaugcaaaaa

SEQ ID NO: 1039 - RNA, 23 nt, Artificial Sequence
  Description of Artificial Sequence: Synthetic oligonucleotide
aacaaaccgaaggcaaugcaaaa

SEQ ID NO: 1040 - RNA, 23 nt, Artificial Sequence
  Description of Artificial Sequence: Synthetic oligonucleotide
auacaaaccgaaggcaaugcaaa

SEQ ID NO: 1041 - RNA, 23 nt, Artificial Sequence
  Description of Artificial Sequence: Synthetic oligonucleotide
aauacaaaccgaaggcaaugcaa

SEQ ID NO: 1042 - RNA, 23 nt, Artificial Sequence
  Description of Artificial Sequence: Synthetic oligonucleotide
aaauacaaaccgaaggcaaugca

SEQ ID NO: 1043 - RNA, 23 nt, Artificial Sequence
  Description of Artificial Sequence: Synthetic oligonucleotide
aaaauacaaaccgaaggcaaugc

SEQ ID NO: 1044 - RNA, 23 nt, Artificial Sequence
  Description of Artificial Sequence: Synthetic oligonucleotide
auaaauacaaaccgaaggcaaug

SEQ ID NO: 1045 - RNA, 23 nt, Artificial Sequence
  Description of Artificial Sequence: Synthetic oligonucleotide
acuaaauacaaaccgaaggcaau

SEQ ID NO: 1046 - RNA, 23 nt, Artificial Sequence
  Description of Artificial Sequence: Synthetic oligonucleotide
aacuaaauacaaaccgaaggcaa

SEQ ID NO: 1047 - RNA, 23 nt, Artificial Sequence
  Description of Artificial Sequence: Synthetic oligonucleotide
acacuaaauacaaaccgaaggca

SEQ ID NO: 1048 - RNA, 23 nt, Artificial Sequence
  Description of Artificial Sequence: Synthetic oligonucleotide
aacacuaaauacaaaccgaaggc

SEQ ID NO: 1049 - RNA, 23 nt, Artificial Sequence
  Description of Artificial Sequence: Synthetic oligonucleotide
agacacuaaauacaaaccgaagg

SEQ ID NO: 1050 - RNA, 23 nt, Artificial Sequence
  Description of Artificial Sequence: Synthetic oligonucleotide
aagacacuaaauacaaaccgaag

SEQ ID NO: 1051 - RNA, 23 nt, Artificial Sequence
  Description of Artificial Sequence: Synthetic oligonucleotide
aaagacacuaaauacaaaccgaa

SEQ ID NO: 1052 - RNA, 23 nt, Artificial Sequence
  Description of Artificial Sequence: Synthetic oligonucleotide
acaagacacuaaauacaaaccga

SEQ ID NO: 1053 - RNA, 23 nt, Artificial Sequence
  Description of Artificial Sequence: Synthetic oligonucleotide
aucaagacacuaaauacaaaccg

SEQ ID NO: 1054 - RNA, 23 nt, Artificial Sequence
  Description of Artificial Sequence: Synthetic oligonucleotide
auucaagacacuaaauacaaacc

SEQ ID NO: 1055 - RNA, 23 nt, Artificial Sequence
  Description of Artificial Sequence: Synthetic oligonucleotide
aauucaagacacuaaauacaaac

SEQ ID NO: 1056 - RNA, 23 nt, Artificial Sequence
  Description of Artificial Sequence: Synthetic oligonucleotide
acauucaagacacuaaauacaaa

SEQ ID NO: 1057 - RNA, 23 nt, Artificial Sequence
  Description of Artificial Sequence: Synthetic oligonucleotide
aacauucaagacacuaaauacaa

SEQ ID NO: 1058 - RNA, 23 nt, Artificial Sequence
  Description of Artificial Sequence: Synthetic oligonucleotide
auacauucaagacacuaaauaca

SEQ ID NO: 1059 - RNA, 23 nt, Artificial Sequence
  Description of Artificial Sequence: Synthetic oligonucleotide
auuacauucaagacacuaaauac

SEQ ID NO: 1060 - RNA, 23 nt, Artificial Sequence
  Description of Artificial Sequence: Synthetic oligonucleotide
acuuacauucaagacacuaaaua

SEQ ID NO: 1061 - RNA, 23 nt, Artificial Sequence
  Description of Artificial Sequence: Synthetic oligonucleotide
aucuuacauucaagacacuaaau

SEQ ID NO: 1062 - RNA, 23 nt, Artificial Sequence
  Description of Artificial Sequence: Synthetic oligonucleotide
auucuuacauucaagacacuaaa

SEQ ID NO: 1063 - RNA, 23 nt, Artificial Sequence
  Description of Artificial Sequence: Synthetic oligonucleotide
aguucuuacauucaagacacuaa

SEQ ID NO: 1064 - RNA, 23 nt, Artificial Sequence
  Description of Artificial Sequence: Synthetic oligonucleotide
aauguucuuacauucaagacacu

SEQ ID NO: 1065 - RNA, 23 nt, Artificial Sequence
  Description of Artificial Sequence: Synthetic oligonucleotide
acauguucuuacauucaagacac

SEQ ID NO: 1066 - RNA, 23 nt, Artificial Sequence
  Description of Artificial Sequence: Synthetic oligonucleotide
aggucauguucuuacauucaaga

SEQ ID NO: 1067 - RNA, 23 nt, Artificial Sequence
  Description of Artificial Sequence: Synthetic oligonucleotide
acacggaggucauguucuuacau

SEQ ID NO: 1068 - RNA, 23 nt, Artificial Sequence
  Description of Artificial Sequence: Synthetic oligonucleotide
aacacggaggucauguucuuaca

SEQ ID NO: 1069 - RNA, 23 nt, Artificial Sequence
  Description of Artificial Sequence: Synthetic oligonucleotide
auacacggaggucauguucuuac

SEQ ID NO: 1070 - RNA, 23 nt, Artificial Sequence
  Description of Artificial Sequence: Synthetic oligonucleotide
acuacacggaggucauguucuua

SEQ ID NO: 1071 - RNA, 23 nt, Artificial Sequence
  Description of Artificial Sequence: Synthetic oligonucleotide
aacuacacggaggucauguucuu

SEQ ID NO: 1072 - RNA, 23 nt, Artificial Sequence
  Description of Artificial Sequence: Synthetic oligonucleotide
acacuacacggaggucauguucu

SEQ ID NO: 1073 - RNA, 23 nt, Artificial Sequence
  Description of Artificial Sequence: Synthetic oligonucleotide
aacacuacacggaggucauguuc

SEQ ID NO: 1074 - RNA, 23 nt, Artificial Sequence
  Description of Artificial Sequence: Synthetic oligonucleotide
agacacuacacggaggucauguu

SEQ ID NO: 1075 - RNA, 23 nt, Artificial Sequence
  Description of Artificial Sequence: Synthetic oligonucleotide
aagacacuacacggaggucaugu

SEQ ID NO: 1076 - RNA, 23 nt, Artificial Sequence
  Description of Artificial Sequence: Synthetic oligonucleotide
acaucuguggaaaaaacuaaggu

SEQ ID NO: 1077 - RNA, 23 nt, Artificial Sequence
  Description of Artificial Sequence: Synthetic oligonucleotide
agcaucuguggaaaaaacuaagg

SEQ ID NO: 1078 - RNA, 23 nt, Artificial Sequence
  Description of Artificial Sequence: Synthetic oligonucleotide
aagcaucuguggaaaaaacuaag

SEQ ID NO: 1079 - RNA, 23 nt, Artificial Sequence
  Description of Artificial Sequence: Synthetic oligonucleotide
acaagcaucuguggaaaaaacua

SEQ ID NO: 1080 - RNA, 23 nt, Artificial Sequence
  Description of Artificial Sequence: Synthetic oligonucleotide
acacaagcaucuguggaaaaaac

SEQ ID NO: 1081 - RNA, 23 nt, Artificial Sequence
  Description of Artificial Sequence: Synthetic oligonucleotide
aucacaagcaucuguggaaaaaa

SEQ ID NO: 1082 - RNA, 23 nt, Artificial Sequence
  Description of Artificial Sequence: Synthetic oligonucleotide
aaucacaagcaucuguggaaaaa

SEQ ID NO: 1083 - RNA, 23 nt, Artificial Sequence
  Description of Artificial Sequence: Synthetic oligonucleotide
aaaucacaagcaucuguggaaaa

SEQ ID NO: 1084 - RNA, 23 nt, Artificial Sequence
  Description of Artificial Sequence: Synthetic oligonucleotide
aaaaucacaagcaucuguggaaa

SEQ ID NO: 1085 - RNA, 23 nt, Artificial Sequence
  Description of Artificial Sequence: Synthetic oligonucleotide
aaaaaucacaagcaucuguggaa

SEQ ID NO: 1086 - RNA, 23 nt, Artificial Sequence
  Description of Artificial Sequence: Synthetic oligonucleotide
aaaaaaucacaagcaucugugga

SEQ ID NO: 1087 - RNA, 23 nt, Artificial Sequence
  Description of Artificial Sequence: Synthetic oligonucleotide
aauucaaacagaaauucaggugc

SEQ ID NO: 1088 - RNA, 23 nt, Artificial Sequence
  Description of Artificial Sequence: Synthetic oligonucleotide
acauucaaacagaaauucaggug

SEQ ID NO: 1089 - RNA, 23 nt, Artificial Sequence
  Description of Artificial Sequence: Synthetic oligonucleotide
aaaauaaccagcuaugguuccgc

SEQ ID NO: 1090 - RNA, 23 nt, Artificial Sequence
  Description of Artificial Sequence: Synthetic oligonucleotide
agaaauaaccagcuaugguuccg

SEQ ID NO: 1091 - RNA, 23 nt, Artificial Sequence
  Description of Artificial Sequence: Synthetic oligonucleotide
aagaaauaaccagcuaugguucc

SEQ ID NO: 1092 - RNA, 23 nt, Artificial Sequence
  Description of Artificial Sequence: Synthetic oligonucleotide
agagaaauaaccagcuaugguuc

SEQ ID NO: 1093 - RNA, 23 nt, Artificial Sequence
  Description of Artificial Sequence: Synthetic oligonucleotide
aggagaaauaaccagcuaugguu

SEQ ID NO: 1094 - RNA, 23 nt, Artificial Sequence
  Description of Artificial Sequence: Synthetic oligonucleotide
acguuuauuacuaacacaaggga

SEQ ID NO: 1095 - RNA, 23 nt, Artificial Sequence
  Description of Artificial Sequence: Synthetic oligonucleotide
aacguuuauuacuaacacaaggg

SEQ ID NO: 1096 - RNA, 23 nt, Artificial Sequence
  Description of Artificial Sequence: Synthetic oligonucleotide
agacguuuauuacuaacacaagg

SEQ ID NO: 1097 - RNA, 23 nt, Artificial Sequence
  Description of Artificial Sequence: Synthetic oligonucleotide
aagacguuuauuacuaacacaag

SEQ ID NO: 1098 - RNA, 23 nt, Artificial Sequence
  Description of Artificial Sequence: Synthetic oligonucleotide
aaagacguuuauuacuaacacaa

SEQ ID NO: 1099 - RNA, 23 nt, Artificial Sequence
  Description of Artificial Sequence: Synthetic oligonucleotide
acaagacguuuauuacuaacaca

SEQ ID NO: 1100 - RNA, 23 nt, Artificial Sequence
  Description of Artificial Sequence: Synthetic oligonucleotide
agcaagacguuuauuacuaacac

SEQ ID NO: 1101 - RNA, 21 nt, Artificial Sequence
  Description of Artificial Sequence: Synthetic oligonucleotide
aaaaauguucucaaaaaugaa

SEQ ID NO: 1102 - RNA, 21 nt, Artificial Sequence
  Description of Artificial Sequence: Synthetic oligonucleotide
aaaaucaccacucuuugggca

SEQ ID NO: 1103 - RNA, 21 nt, Artificial Sequence
  Description of Artificial Sequence: Synthetic oligonucleotide
aaagugggagacccuguguaa

SEQ ID NO: 1104 - RNA, 21 nt, Artificial Sequence
  Description of Artificial Sequence: Synthetic oligonucleotide
aaaugaaagacaaagguggau

SEQ ID NO: 1105 - RNA, 21 nt, Artificial Sequence
  Description of Artificial Sequence: Synthetic oligonucleotide
aaaugaggguuucacagucaa

SEQ ID NO: 1106 - RNA, 21 nt, Artificial Sequence
  Description of Artificial Sequence: Synthetic oligonucleotide
aacuugcuacccauuaggaua

SEQ ID NO: 1107 - RNA, 21 nt, Artificial Sequence
  Description of Artificial Sequence: Synthetic oligonucleotide
aaucaccacucuuugggcagu

SEQ ID NO: 1108 - RNA, 21 nt, Artificial Sequence
  Description of Artificial Sequence: Synthetic oligonucleotide
acaugggccaguggaagauca

SEQ ID NO: 1109 - RNA, 21 nt, Artificial Sequence
  Description of Artificial Sequence: Synthetic oligonucleotide
accaggaacugaaccuugaua

SEQ ID NO: 1110 - RNA, 21 nt, Artificial Sequence
  Description of Artificial Sequence: Synthetic oligonucleotide
accaggaugccacuaugucua

SEQ ID NO: 1111 - RNA, 21 nt, Artificial Sequence
  Description of Artificial Sequence: Synthetic oligonucleotide
accuaacuaaaauaauguuua

SEQ ID NO: 1112 - RNA, 21 nt, Artificial Sequence
  Description of Artificial Sequence: Synthetic oligonucleotide
accucgccugguccugauuua

SEQ ID NO: 1113 - RNA, 21 nt, Artificial Sequence
  Description of Artificial Sequence: Synthetic oligonucleotide
accuguugaauuuuguauuau

SEQ ID NO: 1114 - RNA, 21 nt, Artificial Sequence
  Description of Artificial Sequence: Synthetic oligonucleotide
acuacaugaaccuacagagau

SEQ ID NO: 1115 - RNA, 21 nt, Artificial Sequence
  Description of Artificial Sequence: Synthetic oligonucleotide
acugauuauggaauaguucuu

SEQ ID NO: 1116 - RNA, 21 nt, Artificial Sequence
  Description of Artificial Sequence: Synthetic oligonucleotide
agaaauucuacuacaucuauu

SEQ ID NO: 1117 - RNA, 21 nt, Artificial Sequence
  Description of Artificial Sequence: Synthetic oligonucleotide
agacaggauucugaaaacuca

SEQ ID NO: 1118 - RNA, 21 nt, Artificial Sequence
  Description of Artificial Sequence: Synthetic oligonucleotide
agagcggguaccucuucauca

SEQ ID NO: 1119 - RNA, 21 nt, Artificial Sequence
  Description of Artificial Sequence: Synthetic oligonucleotide
agcaaaggucacaauuuccua

SEQ ID NO: 1120 - RNA, 21 nt, Artificial Sequence
  Description of Artificial Sequence: Synthetic oligonucleotide
agcauaaauguuuucgaaaua

SEQ ID NO: 1121 - RNA, 21 nt, Artificial Sequence
  Description of Artificial Sequence: Synthetic oligonucleotide
agcaugagguucuuagaaugu

SEQ ID NO: 1122 - RNA, 21 nt, Artificial Sequence
  Description of Artificial Sequence: Synthetic oligonucleotide
aggaagcaaccuuucgccugu

SEQ ID NO: 1123 - RNA, 21 nt, Artificial Sequence
  Description of Artificial Sequence: Synthetic oligonucleotide
aggaccagauugcuuacucaa

SEQ ID NO: 1124 - RNA, 21 nt, Artificial Sequence
  Description of Artificial Sequence: Synthetic oligonucleotide
aggagaagaaaagugauucaa

SEQ ID NO: 1125 - RNA, 21 nt, Artificial Sequence
  Description of Artificial Sequence: Synthetic oligonucleotide
agucuucaaguuggcaaaaua

SEQ ID NO: 1126 - RNA, 21 nt, Artificial Sequence
  Description of Artificial Sequence: Synthetic oligonucleotide
aguggacuauguguacaagau

SEQ ID NO: 1127 - RNA, 21 nt, Artificial Sequence
  Description of Artificial Sequence: Synthetic oligonucleotide
aguuccuaucuccuuucagaa

SEQ ID NO: 1128 - RNA, 21 nt, Artificial Sequence
  Description of Artificial Sequence: Synthetic oligonucleotide
auaaugucuuauguaaugcuu

SEQ ID NO: 1129 - RNA, 21 nt, Artificial Sequence
  Description of Artificial Sequence: Synthetic oligonucleotide
auacaugagcaagauuugcaa

SEQ ID NO: 1130 - RNA, 21 nt, Artificial Sequence
  Description of Artificial Sequence: Synthetic oligonucleotide
aucaaccaggagggaaacaua

SEQ ID NO: 1131 - RNA, 21 nt, Artificial Sequence
  Description of Artificial Sequence: Synthetic oligonucleotide
aucaucuuugggucauucuuu

SEQ ID NO: 1132 - RNA, 21 nt, Artificial Sequence
  Description of Artificial Sequence: Synthetic oligonucleotide
aucugaugaaguauauuuuuu

SEQ ID NO: 1133 - RNA, 21 nt, Artificial Sequence
  Description of Artificial Sequence: Synthetic oligonucleotide
aucuucuuugucguagugauu

SEQ ID NO: 1134 - RNA, 21 nt, Artificial Sequence
  Description of Artificial Sequence: Synthetic oligonucleotide
augcugagaaauugucgaaaa

SEQ ID NO: 1135 - RNA, 21 nt, Artificial Sequence
  Description of Artificial Sequence: Synthetic oligonucleotide
auggcuuguuccagaugcauu

SEQ ID NO: 1136 - RNA, 21 nt, Artificial Sequence
  Description of Artificial Sequence: Synthetic oligonucleotide
auguaccaugcuaaggccaaa

SEQ ID NO: 1137 - RNA, 21 nt, Artificial Sequence
  Description of Artificial Sequence: Synthetic oligonucleotide
augucgaguacacuuuuacuu

SEQ ID NO: 1138 - RNA, 21 nt, Artificial Sequence
  Description of Artificial Sequence: Synthetic oligonucleotide
auguuaguagaauaagccuua

SEQ ID NO: 1139 - RNA, 21 nt, Artificial Sequence
  Description of Artificial Sequence: Synthetic oligonucleotide
auuaggauaaugucuuaugua

SEQ ID NO: 1140 - RNA, 21 nt, Artificial Sequence
  Description of Artificial Sequence: Synthetic oligonucleotide
auucucuucguucacagauga

SEQ ID NO: 1141 - RNA, 21 nt, Artificial Sequence
  Description of Artificial Sequence: Synthetic oligonucleotide
caacacuugaagcaugguguu

SEQ ID NO: 1142 - RNA, 21 nt, Artificial Sequence
  Description of Artificial Sequence: Synthetic oligonucleotide
caagauuugcaacuugcuaca

SEQ ID NO: 1143 - RNA, 21 nt, Artificial Sequence
  Description of Artificial Sequence: Synthetic oligonucleotide
caaggucuacgccuauuacau

SEQ ID NO: 1144 - RNA, 21 nt, Artificial Sequence
  Description of Artificial Sequence: Synthetic oligonucleotide
cacccucaucaucuaccugga

SEQ ID NO: 1145 - RNA, 21 nt, Artificial Sequence
  Description of Artificial Sequence: Synthetic oligonucleotide
caccguauccacugggaaucu

SEQ ID NO: 1146 - RNA, 21 nt, Artificial Sequence
  Description of Artificial Sequence: Synthetic oligonucleotide
caccuuuuucaccuaacuaaa

SEQ ID NO: 1147 - RNA, 21 nt, Artificial Sequence
  Description of Artificial Sequence: Synthetic oligonucleotide
caccuuuuucaccuaacuaau

SEQ ID NO: 1148 - RNA, 21 nt, Artificial Sequence
  Description of Artificial Sequence: Synthetic oligonucleotide
cacuccuuccugauuguguuu

SEQ ID NO: 1149 - RNA, 21 nt, Artificial Sequence
  Description of Artificial Sequence: Synthetic oligonucleotide
cagaacgaaaguuauauggaa

SEQ ID NO: 1150 - RNA, 21 nt, Artificial Sequence
  Description of Artificial Sequence: Synthetic oligonucleotide
cagagaaauucuacuacaucu

SEQ ID NO: 1151 - RNA, 21 nt, Artificial Sequence
  Description of Artificial Sequence: Synthetic oligonucleotide
caugaacgacuucuuccacuu

SEQ ID NO: 1152 - RNA, 21 nt, Artificial Sequence
  Description of Artificial Sequence: Synthetic oligonucleotide
caugagcaagauuugcaacuu

SEQ ID NO: 1153 - RNA, 21 nt, Artificial Sequence
  Description of Artificial Sequence: Synthetic oligonucleotide
caugguguuucagaacugaga

SEQ ID NO: 1154 - RNA, 21 nt, Artificial Sequence
  Description of Artificial Sequence: Synthetic oligonucleotide
cauugagaacccggaaggcau

SEQ ID NO: 1155 - RNA, 21 nt, Artificial Sequence
  Description of Artificial Sequence: Synthetic oligonucleotide
ccacagccaaagauaagaacu

SEQ ID NO: 1156 - RNA, 21 nt, Artificial Sequence
  Description of Artificial Sequence: Synthetic oligonucleotide
ccagauccacuucaccaagau

SEQ ID NO: 1157 - RNA, 21 nt, Artificial Sequence
  Description of Artificial Sequence: Synthetic oligonucleotide
ccauuaggauaaugucuuauu

SEQ ID NO: 1158 - RNA, 21 nt, Artificial Sequence
  Description of Artificial Sequence: Synthetic oligonucleotide
cccgucgugcguuggcucaau

SEQ ID NO: 1159 - RNA, 21 nt, Artificial Sequence
  Description of Artificial Sequence: Synthetic oligonucleotide
ccgacccaaggaccagauugu

SEQ ID NO: 1160 - RNA, 21 nt, Artificial Sequence
  Description of Artificial Sequence: Synthetic oligonucleotide
ccgagccguucucuacaauuu

SEQ ID NO: 1161 - RNA, 21 nt, Artificial Sequence
  Description of Artificial Sequence: Synthetic oligonucleotide
ccguauguccuggaauauuau

SEQ ID NO: 1162 - RNA, 21 nt, Artificial Sequence
  Description of Artificial Sequence: Synthetic oligonucleotide
ccuaacuaaaauaauguuuaa

SEQ ID NO: 1163 - RNA, 21 nt, Artificial Sequence
  Description of Artificial Sequence: Synthetic oligonucleotide
ccuugucuucucagaaccaga

SEQ ID NO: 1164 - RNA, 21 nt, Artificial Sequence
  Description of Artificial Sequence: Synthetic oligonucleotide
cgacaucugcccuaaagucaa

SEQ ID NO: 1165 - RNA, 21 nt, Artificial Sequence
  Description of Artificial Sequence: Synthetic oligonucleotide
cgugcguuggcucaaugaacu

SEQ ID NO: 1166 - RNA, 21 nt, Artificial Sequence
  Description of Artificial Sequence: Synthetic oligonucleotide
cuacccuacucuguuguucga

SEQ ID NO: 1167 - RNA, 21 nt, Artificial Sequence
  Description of Artificial Sequence: Synthetic oligonucleotide
cuacugcagcuaaaagacuuu

SEQ ID NO: 1168 - RNA, 21 nt, Artificial Sequence
  Description of Artificial Sequence: Synthetic oligonucleotide
cuagugcuguccagugagaaa

SEQ ID NO: 1169 - RNA, 21 nt, Artificial Sequence
  Description of Artificial Sequence: Synthetic oligonucleotide
cuauuaauggucagacuguua

SEQ ID NO: 1170 - RNA, 21 nt, Artificial Sequence
  Description of Artificial Sequence: Synthetic oligonucleotide
cuccauggcggggguaacaaa

SEQ ID NO: 1171 - RNA, 21 nt, Artificial Sequence
  Description of Artificial Sequence: Synthetic oligonucleotide
cugaguugguuuuaugaaaau

SEQ ID NO: 1172 - RNA, 21 nt, Artificial Sequence
  Description of Artificial Sequence: Synthetic oligonucleotide
cugcccaaaauacugauaaua

SEQ ID NO: 1173 - RNA, 21 nt, Artificial Sequence
  Description of Artificial Sequence: Synthetic oligonucleotide
cugggaggacccugguaagca

SEQ ID NO: 1174 - RNA, 21 nt, Artificial Sequence
  Description of Artificial Sequence: Synthetic oligonucleotide
cuguggaggagaagaaaagua

SEQ ID NO: 1175 - RNA, 21 nt, Artificial Sequence
  Description of Artificial Sequence: Synthetic oligonucleotide
cuucuuauuggugacguggaa

SEQ ID NO: 1176 - RNA, 21 nt, Artificial Sequence
  Description of Artificial Sequence: Synthetic oligonucleotide
cuuguuccagaugcauuuuaa

SEQ ID NO: 1177 - RNA, 21 nt, Artificial Sequence
  Description of Artificial Sequence: Synthetic oligonucleotide
cuuugucguagugauuuuccu

SEQ ID NO: 1178 - RNA, 21 nt, Artificial Sequence
  Description of Artificial Sequence: Synthetic oligonucleotide
gacagacaagaccaucuacau

SEQ ID NO: 1179 - RNA, 21 nt, Artificial Sequence
  Description of Artificial Sequence: Synthetic oligonucleotide
gagaaauucuacuacaucuau

SEQ ID NO: 1180 - RNA, 21 nt, Artificial Sequence
  Description of Artificial Sequence: Synthetic oligonucleotide
gagaaccagaaacaaugccau

SEQ ID NO: 1181 - RNA, 21 nt, Artificial Sequence
  Description of Artificial Sequence: Synthetic oligonucleotide
gaggucaagacaucuuuauga

SEQ ID NO: 1182 - RNA, 21 nt, Artificial Sequence
  Description of Artificial Sequence: Synthetic oligonucleotide
gagugcuccuucuccaguucu

SEQ ID NO: 1183 - RNA, 21 nt, Artificial Sequence
  Description of Artificial Sequence: Synthetic oligonucleotide
gauuugcaacuugcuacccau

SEQ ID NO: 1184 - RNA, 21 nt, Artificial Sequence
  Description of Artificial Sequence: Synthetic oligonucleotide
gcacagggaaccucuaccuua

SEQ ID NO: 1185 - RNA, 21 nt, Artificial Sequence
  Description of Artificial Sequence: Synthetic oligonucleotide
gcaggcagagcgcagcgggau

SEQ ID NO: 1186 - RNA, 21 nt, Artificial Sequence
  Description of Artificial Sequence: Synthetic oligonucleotide
gccauuccccucagcuaauga

SEQ ID NO: 1187 - RNA, 21 nt, Artificial Sequence
  Description of Artificial Sequence: Synthetic oligonucleotide
gccucuucuuaacaaauuucu

SEQ ID NO: 1188 - RNA, 21 nt, Artificial Sequence
  Description of Artificial Sequence: Synthetic oligonucleotide
gcguuguaguuccuaucuccu

SEQ ID NO: 1189 - RNA, 21 nt, Artificial Sequence
  Description of Artificial Sequence: Synthetic oligonucleotide
gcucaucaugugcacuauucu

SEQ ID NO: 1190 - RNA, 21 nt, Artificial Sequence
  Description of Artificial Sequence: Synthetic oligonucleotide
gcugaggagaauugcuucauu

SEQ ID NO: 1191 - RNA, 21 nt, Artificial Sequence
  Description of Artificial Sequence: Synthetic oligonucleotide
gcugaguugguuuuaugaaaa

SEQ ID NO: 1192 - RNA, 21 nt, Artificial Sequence
  Description of Artificial Sequence: Synthetic oligonucleotide
gcuucucagacagcauuggau

SEQ ID NO: 1193 - RNA, 21 nt, Artificial Sequence
  Description of Artificial Sequence: Synthetic oligonucleotide
ggaccagauugcuuacucaga

SEQ ID NO: 1194 - RNA, 21 nt, Artificial Sequence
  Description of Artificial Sequence: Synthetic oligonucleotide
ggagguugugcugagccggaa

SEQ ID NO: 1195 - RNA, 21 nt, Artificial Sequence
  Description of Artificial Sequence: Synthetic oligonucleotide
ggcacaugaacgacuucuuca

SEQ ID NO: 1196 - RNA, 21 nt, Artificial Sequence
  Description of Artificial Sequence: Synthetic oligonucleotide
ggccuuaucccuccuuccuua

SEQ ID NO: 1197 - RNA, 21 nt, Artificial Sequence
  Description of Artificial Sequence: Synthetic oligonucleotide
ggcuggauuuccuaauuguuu

SEQ ID NO: 1198 - RNA, 21 nt, Artificial Sequence
  Description of Artificial Sequence: Synthetic oligonucleotide
gggaaaacaaucuuccguuua

SEQ ID NO: 1199 - RNA, 21 nt, Artificial Sequence
  Description of Artificial Sequence: Synthetic oligonucleotide
gggguaacaagaugauaaucu

SEQ ID NO: 1200 - RNA, 21 nt, Artificial Sequence
  Description of Artificial Sequence: Synthetic oligonucleotide
ggugucucaaugcuucaaugu

SEQ ID NO: 1201 - RNA, 21 nt, Artificial Sequence
  Description of Artificial Sequence: Synthetic oligonucleotide
guaaugcaggacuucuucauu

SEQ ID NO: 1202 - RNA, 21 nt, Artificial Sequence
  Description of Artificial Sequence: Synthetic oligonucleotide
guaccucuucauccagacagu

SEQ ID NO: 1203 - RNA, 21 nt, Artificial Sequence
  Description of Artificial Sequence: Synthetic oligonucleotide
guauaacucuaagaucugauu

SEQ ID NO: 1204 - RNA, 21 nt, Artificial Sequence
  Description of Artificial Sequence: Synthetic oligonucleotide
guccucuaagaagaauaucua

SEQ ID NO: 1205 - RNA, 21 nt, Artificial Sequence
  Description of Artificial Sequence: Synthetic oligonucleotide
gugacccuucagaacgaaagu

SEQ ID NO: 1206 - RNA, 21 nt, Artificial Sequence
  Description of Artificial Sequence: Synthetic oligonucleotide
gugagugacaacguacccuua

SEQ ID NO: 1207 - RNA, 21 nt, Artificial Sequence
  Description of Artificial Sequence: Synthetic oligonucleotide
gugcuaaaguuucccaucuuu

SEQ ID NO: 1208 - RNA, 21 nt, Artificial Sequence
  Description of Artificial Sequence: Synthetic oligonucleotide
gugggagaaguucggccuaga

SEQ ID NO: 1209 - RNA, 21 nt, Artificial Sequence
  Description of Artificial Sequence: Synthetic oligonucleotide
uaacucuaagaucugaugaau

SEQ ID NO: 1210 - RNA, 21 nt, Artificial Sequence
  Description of Artificial Sequence: Synthetic oligonucleotide
uacaugaucuucuuugucgua

SEQ ID NO: 1211 - RNA, 21 nt, Artificial Sequence
  Description of Artificial Sequence: Synthetic oligonucleotide
uaccuguugaauuuuguauua

SEQ ID NO: 1212 - RNA, 21 nt, Artificial Sequence
  Description of Artificial Sequence: Synthetic oligonucleotide
uacgugcugcccaguuucgaa

SEQ ID NO: 1213 - RNA, 21 nt, Artificial Sequence
  Description of Artificial Sequence: Synthetic oligonucleotide
uaggauaaugucuuauguaau

SEQ ID NO: 1214 - RNA, 21 nt, Artificial Sequence
  Description of Artificial Sequence: Synthetic oligonucleotide
uaugccaaaauccuuuuuaua

SEQ ID NO: 1215 - RNA, 21 nt, Artificial Sequence
  Description of Artificial Sequence: Synthetic oligonucleotide
uaugugaaacaaaccuuacga

SEQ ID NO: 1216 - RNA, 21 nt, Artificial Sequence
  Description of Artificial Sequence: Synthetic oligonucleotide
uauuguaauuucaggaugcga

SEQ ID NO: 1217 - RNA, 21 nt, Artificial Sequence
  Description of Artificial Sequence: Synthetic oligonucleotide
ucaaugcuucaaugucccagu

SEQ ID NO: 1218 - RNA, 21 nt, Artificial Sequence
  Description of Artificial Sequence: Synthetic oligonucleotide
ucacuugaggaggcgagucua

SEQ ID NO: 1219 - RNA, 21 nt, Artificial Sequence
  Description of Artificial Sequence: Synthetic oligonucleotide
ucagaacgaaaguuauaugga

SEQ ID NO: 1220 - RNA, 21 nt, Artificial Sequence
  Description of Artificial Sequence: Synthetic oligonucleotide
ucaggaugcgaugucuaugca

SEQ ID NO: 1221 - RNA, 21 nt, Artificial Sequence
  Description of Artificial Sequence: Synthetic oligonucleotide
uccauagaucuggaucuggca

SEQ ID NO: 1222 - RNA, 21 nt, Artificial Sequence
  Description of Artificial Sequence: Synthetic oligonucleotide
uccauugucuugacaucuuau

SEQ ID NO: 1223 - RNA, 21 nt, Artificial Sequence
  Description of Artificial Sequence: Synthetic oligonucleotide
uccucuaagaagaauaucuau

SEQ ID NO: 1224 - RNA, 21 nt, Artificial Sequence
  Description of Artificial Sequence: Synthetic oligonucleotide
uccugcaagucaaguuccaaa

SEQ ID NO: 1225 - RNA, 21 nt, Artificial Sequence
  Description of Artificial Sequence: Synthetic oligonucleotide
ucugagcugaguugguuuuau

SEQ ID NO: 1226 - RNA, 21 nt, Artificial Sequence
  Description of Artificial Sequence: Synthetic oligonucleotide
ugacccuucagaacgaaaguu

SEQ ID NO: 1227 - RNA, 21 nt, Artificial Sequence
  Description of Artificial Sequence: Synthetic oligonucleotide
ugagugaagaaaugaaagaca

SEQ ID NO: 1228 - RNA, 21 nt, Artificial Sequence
  Description of Artificial Sequence: Synthetic oligonucleotide
ugauaguuaccuaguuugcaa

SEQ ID NO: 1229 - RNA, 21 nt, Artificial Sequence
  Description of Artificial Sequence: Synthetic oligonucleotide
ugcagacaagaucuucacuua

SEQ ID NO: 1230 - RNA, 21 nt, Artificial Sequence
  Description of Artificial Sequence: Synthetic oligonucleotide
ugccaaaacaaccaucaccgu

SEQ ID NO: 1231 - RNA, 21 nt, Artificial Sequence
  Description of Artificial Sequence: Synthetic oligonucleotide
ugcgaucagaagagaccaagu

SEQ ID NO: 1232 - RNA, 21 nt, Artificial Sequence
  Description of Artificial Sequence: Synthetic oligonucleotide
ugcuaaggccaaagaucaacu

SEQ ID NO: 1233 - RNA, 21 nt, Artificial Sequence
  Description of Artificial Sequence: Synthetic oligonucleotide
ugcucuccauauuggauaaaa

SEQ ID NO: 1234 - RNA, 21 nt, Artificial Sequence
  Description of Artificial Sequence: Synthetic oligonucleotide
ugcucuccuuugugguuucau

SEQ ID NO: 1235 - RNA, 21 nt, Artificial Sequence
  Description of Artificial Sequence: Synthetic oligonucleotide
uggacuauguguacaagaccu

SEQ ID NO: 1236 - RNA, 21 nt, Artificial Sequence
  Description of Artificial Sequence: Synthetic oligonucleotide
uggaggagaagaaaagugauu

SEQ ID NO: 1237 - RNA, 21 nt, Artificial Sequence
  Description of Artificial Sequence: Synthetic oligonucleotide
uggauacaugagcaagauuua

SEQ ID NO: 1238 - RNA, 21 nt, Artificial Sequence
  Description of Artificial Sequence: Synthetic oligonucleotide
ugggagagauaugccuucgaa

SEQ ID NO: 1239 - RNA, 21 nt, Artificial Sequence
  Description of Artificial Sequence: Synthetic oligonucleotide
ugggcaacuccaacaauuacu

SEQ ID NO: 1240 - RNA, 21 nt, Artificial Sequence
  Description of Artificial Sequence: Synthetic oligonucleotide
ugggucauucuucacuuugaa

SEQ ID NO: 1241 - RNA, 21 nt, Artificial Sequence
  Description of Artificial Sequence: Synthetic oligonucleotide
uggucuuuacuggaaucuuuu

SEQ ID NO: 1242 - RNA, 21 nt, Artificial Sequence
  Description of Artificial Sequence: Synthetic oligonucleotide
uggugacauggcuuccagaua

SEQ ID NO: 1243 - RNA, 21 nt, Artificial Sequence
  Description of Artificial Sequence: Synthetic oligonucleotide
uggugucaucauagauaauuu

SEQ ID NO: 1244 - RNA, 21 nt, Artificial Sequence
  Description of Artificial Sequence: Synthetic oligonucleotide
uggugucucaaugcuucaaua

SEQ ID NO: 1245 - RNA, 21 nt, Artificial Sequence
  Description of Artificial Sequence: Synthetic oligonucleotide
uguacaagacccgacugguca

SEQ ID NO: 1246 - RNA, 21 nt, Artificial Sequence
  Description of Artificial Sequence: Synthetic oligonucleotide
uguaggagaauucacuuuuca

SEQ ID NO: 1247 - RNA, 21 nt, Artificial Sequence
  Description of Artificial Sequence: Synthetic oligonucleotide
uguaggagaauucacuuuucu

SEQ ID NO: 1248 - RNA, 21 nt, Artificial Sequence
  Description of Artificial Sequence: Synthetic oligonucleotide
ugucgaguacacuuuuacuga

SEQ ID NO: 1249 - RNA, 21 nt, Artificial Sequence
  Description of Artificial Sequence: Synthetic oligonucleotide
uguucgugcugaauaagaagu

SEQ ID NO: 1250 - RNA, 21 nt, Artificial Sequence
  Description of Artificial Sequence: Synthetic oligonucleotide
uguucugucugaguguguuua

SEQ ID NO: 1251 - RNA, 21 nt, Artificial Sequence
  Description of Artificial Sequence: Synthetic oligonucleotide
uguuuaaaacccaauaucuau

SEQ ID NO: 1252 - RNA, 21 nt, Artificial Sequence
  Description of Artificial Sequence: Synthetic oligonucleotide
uuaaaacugugaauaaaugga

SEQ ID NO: 1253 - RNA, 21 nt, Artificial Sequence
  Description of Artificial Sequence: Synthetic oligonucleotide
uuaccuaucucugcuucaagu

SEQ ID NO: 1254 - RNA, 21 nt, Artificial Sequence
  Description of Artificial Sequence: Synthetic oligonucleotide
uuaccuguugaauuuuguauu

SEQ ID NO: 1255 - RNA, 21 nt, Artificial Sequence
  Description of Artificial Sequence: Synthetic oligonucleotide
uuauguaaugcugcccuguaa

SEQ ID NO: 1256 - RNA, 21 nt, Artificial Sequence
  Description of Artificial Sequence: Synthetic oligonucleotide
uuccucaaggaaaaagauaaa

SEQ ID NO: 1257 - RNA, 21 nt, Artificial Sequence
  Description of Artificial Sequence: Synthetic oligonucleotide
uucgugcugaauaagaagaau

SEQ ID NO: 1258 - RNA, 21 nt, Artificial Sequence
  Description of Artificial Sequence: Synthetic oligonucleotide
uugccauuuuguccuuugauu

SEQ ID NO: 1259 - RNA, 21 nt, Artificial Sequence
  Description of Artificial Sequence: Synthetic oligonucleotide
uugcuacccauuaggauaaua

SEQ ID NO: 1260 - RNA, 21 nt, Artificial Sequence
  Description of Artificial Sequence: Synthetic oligonucleotide
uugguuuuaugaaaagcuaga

SEQ ID NO: 1261 - RNA, 21 nt, Artificial Sequence
  Description of Artificial Sequence: Synthetic oligonucleotide
uuguaauuucaggaugcgaua

SEQ ID NO: 1262 - RNA, 21 nt, Artificial Sequence
  Description of Artificial Sequence: Synthetic oligonucleotide
uuguuccagaugcauuuuaau

SEQ ID NO: 1263 - RNA, 21 nt, Artificial Sequence
  Description of Artificial Sequence: Synthetic oligonucleotide
uuuaguacacuccuuauucau

SEQ ID NO: 1264 - RNA, 21 nt, Artificial Sequence
  Description of Artificial Sequence: Synthetic oligonucleotide
uuuaucaucuuugggucauua

SEQ ID NO: 1265 - RNA, 21 nt, Artificial Sequence
  Description of Artificial Sequence: Synthetic oligonucleotide
uuuccauagaucuggaucuga

SEQ ID NO: 1266 - RNA, 21 nt, Artificial Sequence
  Description of Artificial Sequence: Synthetic oligonucleotide
uuuguagaucuugcaauuaca

SEQ ID NO: 1267 - RNA, 21 nt, Artificial Sequence
  Description of Artificial Sequence: Synthetic oligonucleotide
uuuuagaacaccuuuuucacu

SEQ ID NO: 1268 - RNA, 21 nt, Artificial Sequence
  Description of Artificial Sequence: Synthetic oligonucleotide
uuuuucaccuaacuaaaauaa

SEQ ID NO: 1269 - DNA, 23 bp, Artificial Sequence
  Description of Artificial Sequence: Synthetic oligonucleotide
  Description of Combined DNA/RNA Molecule: Synthetic oligonucleotide
utcatutuugagaacauuuuuaa

SEQ ID NO: 1270 - DNA, 23 bp, Artificial Sequence
  Description of Artificial Sequence: Synthetic oligonucleotide
  Description of Combined DNA/RNA Molecule: Synthetic oligonucleotide
ugcccaaagagtggugauuuucc

SEQ ID NO: 1271 - DNA, 23 bp, Artificial Sequence
  Description of Artificial Sequence: Synthetic oligonucleotide
  Description of Combined DNA/RNA Molecule: Synthetic oligonucleotide
utacacagggucucccacuuuga

SEQ ID NO: 1272 - DNA, 23 bp, Artificial Sequence
  Description of Artificial Sequence: Synthetic oligonucleotide
  Description of Combined DNA/RNA Molecule: Synthetic oligonucleotide
atccaccuuugtcuuucauuucu

SEQ ID NO: 1273 - DNA, 23 bp, Artificial Sequence
  Description of Artificial Sequence: Synthetic oligonucleotide
  Description of Combined DNA/RNA Molecule: Synthetic oligonucleotide
utgacugugaaacccucauuuuc

SEQ ID NO: 1274 - RNA, 23 nt, Artificial Sequence
  Description of Artificial Sequence: Synthetic oligonucleotide
uauccuaauggguagcaaguugc

SEQ ID NO: 1275 - RNA, 23 nt, Artificial Sequence
  Description of Artificial Sequence: Synthetic oligonucleotide
acugcccaaagaguggugauuuu

SEQ ID NO: 1276 - DNA, 23 bp, Artificial Sequence
  Description of Artificial Sequence: Synthetic oligonucleotide
  Description of Combined DNA/RNA Molecule: Synthetic oligonucleotide
ugaucutccactggcccauguug

SEQ ID NO: 1277 - RNA, 23 nt, Artificial Sequence
  Description of Artificial Sequence: Synthetic oligonucleotide
uaucaagguucaguuccuggugg

SEQ ID NO: 1278 - DNA, 23 bp, Artificial Sequence
  Description of Artificial Sequence: Synthetic oligonucleotide
  Description of Combined DNA/RNA Molecule: Synthetic oligonucleotide
uagacataguggcauccuggucu

SEQ ID NO: 1279 - DNA, 23 bp, Artificial Sequence
  Description of Artificial Sequence: Synthetic oligonucleotide
  Description of Combined DNA/RNA Molecule: Synthetic oligonucleotide
uaaacatuauutuaguuagguga

SEQ ID NO: 1280 - DNA, 23 bp, Artificial Sequence
  Description of Artificial Sequence: Synthetic oligonucleotide
  Description of Combined DNA/RNA Molecule: Synthetic oligonucleotide
uaaatcaggaccaggcgagguuc

SEQ ID NO: 1281 - DNA, 23 bp, Artificial Sequence
  Description of Artificial Sequence: Synthetic oligonucleotide
  Description of Combined DNA/RNA Molecule: Synthetic oligonucleotide
ataatacaaaatucaacagguaa

SEQ ID NO: 1282 - DNA, 23 bp, Artificial Sequence
  Description of Artificial Sequence: Synthetic oligonucleotide
  Description of Combined DNA/RNA Molecule: Synthetic oligonucleotide
atcucuguaggtucauguaguug

SEQ ID NO: 1283 - DNA, 23 bp, Artificial Sequence
  Description of Artificial Sequence: Synthetic oligonucleotide
  Description of Combined DNA/RNA Molecule: Synthetic oligonucleotide
aagaactauuccauaaucaguua

SEQ ID NO: 1284 - DNA, 23 bp, Artificial Sequence
  Description of Artificial Sequence: Synthetic oligonucleotide
  Description of Combined DNA/RNA Molecule: Synthetic oligonucleotide
aauagatguagtagaauuucucu

SEQ ID NO: 1285 - DNA, 23 bp, Artificial Sequence
  Description of Artificial Sequence: Synthetic oligonucleotide
  Description of Combined DNA/RNA Molecule: Synthetic oligonucleotide
ugagtutucagaauccugucuug

SEQ ID NO: 1286 - DNA, 23 bp, Artificial Sequence
  Description of Artificial Sequence: Synthetic oligonucleotide
  Description of Combined DNA/RNA Molecule: Synthetic oligonucleotide
ugaugaagaggtacccgcucugc

SEQ ID NO: 1287 - RNA, 23 nt, Artificial Sequence
  Description of Artificial Sequence: Synthetic oligonucleotide
uaggaaauugugaccuuugcuca

SEQ ID NO: 1288 - DNA, 23 bp, Artificial Sequence
  Description of Artificial Sequence: Synthetic oligonucleotide
  Description of Combined DNA/RNA Molecule: Synthetic oligonucleotide
uauutcgaaaacauuuaugcuuc

SEQ ID NO: 1289 - DNA, 23 bp, Artificial Sequence
  Description of Artificial Sequence: Synthetic oligonucleotide
  Description of Combined DNA/RNA Molecule: Synthetic oligonucleotide
acautctaagaaccucaugcugg

SEQ ID NO: 1290 - RNA, 23 nt, Artificial Sequence
  Description of Artificial Sequence: Synthetic oligonucleotide
acaggcgaaagguugcuuccuag

SEQ ID NO: 1291 - DNA, 23 bp, Artificial Sequence
  Description of Artificial Sequence: Synthetic oligonucleotide
  Description of Combined DNA/RNA Molecule: Synthetic oligonucleotide
utgaguaagcaaucugguccuug

SEQ ID NO: 1292 - DNA, 23 bp, Artificial Sequence
  Description of Artificial Sequence: Synthetic oligonucleotide
  Description of Combined DNA/RNA Molecule: Synthetic oligonucleotide
utgaaucacuutucuucuccucc

SEQ ID NO: 1293 - DNA, 23 bp, Artificial Sequence
  Description of Artificial Sequence: Synthetic oligonucleotide
  Description of Combined DNA/RNA Molecule: Synthetic oligonucleotide
uauutugccaacuugaagacucg

SEQ ID NO: 1294 - DNA, 23 bp, Artificial Sequence
  Description of Artificial Sequence: Synthetic oligonucleotide
  Description of Combined DNA/RNA Molecule: Synthetic oligonucleotide
atcutgtacacauaguccacucc

SEQ ID NO: 1295 - DNA, 23 bp, Artificial Sequence
  Description of Artificial Sequence: Synthetic oligonucleotide
  Description of Combined DNA/RNA Molecule: Synthetic oligonucleotide
utcugaaaggagauaggaacuac

SEQ ID NO: 1296 - DNA, 23 bp, Artificial Sequence
  Description of Artificial Sequence: Synthetic oligonucleotide
  Description of Combined DNA/RNA Molecule: Synthetic oligonucleotide
aagcautacauaagacauuaucc

SEQ ID NO: 1297 - DNA, 23 bp, Artificial Sequence
  Description of Artificial Sequence: Synthetic oligonucleotide
  Description of Combined DNA/RNA Molecule: Synthetic oligonucleotide
utgcaaaucuugcucauguaucc

SEQ ID NO: 1298 - DNA, 23 bp, Artificial Sequence
  Description of Artificial Sequence: Synthetic oligonucleotide
  Description of Combined DNA/RNA Molecule: Synthetic oligonucleotide
uaugtutcccuccugguugauca

SEQ ID NO: 1299 - DNA, 23 bp, Artificial Sequence
  Description of Artificial Sequence: Synthetic oligonucleotide
  Description of Combined DNA/RNA Molecule: Synthetic oligonucleotide
aaagaatgacccaaagaugauaa

SEQ ID NO: 1300 - DNA, 23 bp, Artificial Sequence
  Description of Artificial Sequence: Synthetic oligonucleotide
  Description of Combined DNA/RNA Molecule: Synthetic oligonucleotide
aaaaaatauactucaucagaucu

SEQ ID NO: 1301 - DNA, 23 bp, Artificial Sequence
  Description of Artificial Sequence: Synthetic oligonucleotide
  Description of Combined DNA/RNA Molecule: Synthetic oligonucleotide
aaucactacgacaaagaagauca

SEQ ID NO: 1302 - DNA, 23 bp, Artificial Sequence
  Description of Artificial Sequence: Synthetic oligonucleotide
  Description of Combined DNA/RNA Molecule: Synthetic oligonucleotide
utuucgacaautucucagcaucu

SEQ ID NO: 1303 - DNA, 23 bp, Artificial Sequence
  Description of Artificial Sequence: Synthetic oligonucleotide
  Description of Combined DNA/RNA Molecule: Synthetic oligonucleotide
aaugcatcuggaacaagccauca

SEQ ID NO: 1304 - DNA, 23 bp, Artificial Sequence
  Description of Artificial Sequence: Synthetic oligonucleotide
  Description of Combined DNA/RNA Molecule: Synthetic oligonucleotide
utuggccuuagcaugguacauug

SEQ ID NO: 1305 - DNA, 23 bp, Artificial Sequence
  Description of Artificial Sequence: Synthetic oligonucleotide
  Description of Combined DNA/RNA Molecule: Synthetic oligonucleotide
aaguaaaagugtacucgacauuu

SEQ ID NO: 1306 - DNA, 23 bp, Artificial Sequence
  Description of Artificial Sequence: Synthetic oligonucleotide
  Description of Combined DNA/RNA Molecule: Synthetic oligonucleotide
uaaggctuauucuacuaacaucu

SEQ ID NO: 1307 - DNA, 23 bp, Artificial Sequence
  Description of Artificial Sequence: Synthetic oligonucleotide
  Description of Combined DNA/RNA Molecule: Synthetic oligonucleotide
uacataagacatuauccuaaugg

SEQ ID NO: 1308 - RNA, 23 nt, Artificial Sequence
  Description of Artificial Sequence: Synthetic oligonucleotide
ucaucugugaacgaagagaaucc

SEQ ID NO: 1309 - DNA, 23 bp, Artificial Sequence
  Description of Artificial Sequence: Synthetic oligonucleotide
  Description of Combined DNA/RNA Molecule: Synthetic oligonucleotide
aacaccaugcutcaaguguuguc

SEQ ID NO: 1310 - RNA, 23 nt, Artificial Sequence
  Description of Artificial Sequence: Synthetic oligonucleotide
uguagcaaguugcaaaucuugcu

SEQ ID NO: 1311 - DNA, 23 bp, Artificial Sequence
  Description of Artificial Sequence: Synthetic oligonucleotide
  Description of Combined DNA/RNA Molecule: Synthetic oligonucleotide
atguaataggcguagaccuugac

SEQ ID NO: 1312 - DNA, 23 bp, Artificial Sequence
  Description of Artificial Sequence: Synthetic oligonucleotide
  Description of Combined DNA/RNA Molecule: Synthetic oligonucleotide
uccaggtagaugaugaggguguu

SEQ ID NO: 1313 - DNA, 23 bp, Artificial Sequence
  Description of Artificial Sequence: Synthetic oligonucleotide
  Description of Combined DNA/RNA Molecule: Synthetic oligonucleotide
agautcccaguggauacgguggg

SEQ ID NO: 1314 - DNA, 23 bp, Artificial Sequence
  Description of Artificial Sequence: Synthetic oligonucleotide
  Description of Combined DNA/RNA Molecule: Synthetic oligonucleotide
utuagutaggugaaaaagguguu

SEQ ID NO: 1315 - DNA, 23 bp, Artificial Sequence
  Description of Artificial Sequence: Synthetic oligonucleotide
  Description of Combined DNA/RNA Molecule: Synthetic oligonucleotide
atuagutaggugaaaaagguguu

SEQ ID NO: 1316 - RNA, 23 nt, Artificial Sequence
  Description of Artificial Sequence: Synthetic oligonucleotide
aaacacaaucaggaaggagugga

SEQ ID NO: 1317 - DNA, 23 bp, Artificial Sequence
  Description of Artificial Sequence: Synthetic oligonucleotide
  Description of Combined DNA/RNA Molecule: Synthetic oligonucleotide
utccauauaactuucguucugaa

SEQ ID NO: 1318 - RNA, 23 nt, Artificial Sequence
  Description of Artificial Sequence: Synthetic oligonucleotide
agauguaguagaauuucucugua

SEQ ID NO: 1319 - RNA, 23 nt, Artificial Sequence
  Description of Artificial Sequence: Synthetic oligonucleotide
aaguggaagaagucguucaugug

SEQ ID NO: 1320 - DNA, 23 bp, Artificial Sequence
  Description of Artificial Sequence: Synthetic oligonucleotide
  Description of Combined DNA/RNA Molecule: Synthetic oligonucleotide
aagutgcaaaucuugcucaugua

SEQ ID NO: 1321 - DNA, 23 bp, Artificial Sequence
  Description of Artificial Sequence: Synthetic oligonucleotide
  Description of Combined DNA/RNA Molecule: Synthetic oligonucleotide
ucucagtucugaaacaccaugcu

SEQ ID NO: 1322 - DNA, 23 bp, Artificial Sequence
  Description of Artificial Sequence: Synthetic oligonucleotide
  Description of Combined DNA/RNA Molecule: Synthetic oligonucleotide
atgccutccggguucucaauguu

SEQ ID NO: 1323 - DNA, 23 bp, Artificial Sequence
  Description of Artificial Sequence: Synthetic oligonucleotide
  Description of Combined DNA/RNA Molecule: Synthetic oligonucleotide
aguucutaucutuggcugugguc

SEQ ID NO: 1324 - DNA, 23 bp, Artificial Sequence
  Description of Artificial Sequence: Synthetic oligonucleotide
  Description of Combined DNA/RNA Molecule: Synthetic oligonucleotide
atcutggugaaguggaucuggua

SEQ ID NO: 1325 - RNA, 23 nt, Artificial Sequence
  Description of Artificial Sequence: Synthetic oligonucleotide
aauaagacauuauccuaaugggu

SEQ ID NO: 1326 - DNA, 23 bp, Artificial Sequence
  Description of Artificial Sequence: Synthetic oligonucleotide
  Description of Combined DNA/RNA Molecule: Synthetic oligonucleotide
atugagccaacgcacgacgggag

SEQ ID NO: 1327 - DNA, 23 bp, Artificial Sequence
  Description of Artificial Sequence: Synthetic oligonucleotide
  Description of Combined DNA/RNA Molecule: Synthetic oligonucleotide
acaatctgguccuugggucggaa

SEQ ID NO: 1328 - DNA, 23 bp, Artificial Sequence
  Description of Artificial Sequence: Synthetic oligonucleotide
  Description of Combined DNA/RNA Molecule: Synthetic oligonucleotide
aaautgtagagaacggcucggau

SEQ ID NO: 1329 - DNA, 23 bp, Artificial Sequence
  Description of Artificial Sequence: Synthetic oligonucleotide
  Description of Combined DNA/RNA Molecule: Synthetic oligonucleotide
ataatatuccaggacauacgguu

SEQ ID NO: 1330 - DNA, 23 bp, Artificial Sequence
  Description of Artificial Sequence: Synthetic oligonucleotide
  Description of Combined DNA/RNA Molecule: Synthetic oligonucleotide
utaaacauuautuuaguuaggug

SEQ ID NO: 1331 - DNA, 23 bp, Artificial Sequence
  Description of Artificial Sequence: Synthetic oligonucleotide
  Description of Combined DNA/RNA Molecule: Synthetic oligonucleotide
ucuggutcugagaagacaaggag

SEQ ID NO: 1332 - DNA, 23 bp, Artificial Sequence
  Description of Artificial Sequence: Synthetic oligonucleotide
  Description of Combined DNA/RNA Molecule: Synthetic oligonucleotide
utgacutuagggcagaugucgua

SEQ ID NO: 1333 - DNA, 23 bp, Artificial Sequence
  Description of Artificial Sequence: Synthetic oligonucleotide
  Description of Combined DNA/RNA Molecule: Synthetic oligonucleotide
aguucatugagccaacgcacgac

SEQ ID NO: 1334 - RNA, 23 nt, Artificial Sequence
  Description of Artificial Sequence: Synthetic oligonucleotide
ucgaacaacagaguaggguagcc

SEQ ID NO: 1335 - DNA, 23 bp, Artificial Sequence
  Description of Artificial Sequence: Synthetic oligonucleotide
  Description of Combined DNA/RNA Molecule: Synthetic oligonucleotide
aaagtctuuuagcugcaguaggg

SEQ ID NO: 1336 - DNA, 23 bp, Artificial Sequence
  Description of Artificial Sequence: Synthetic oligonucleotide
  Description of Combined DNA/RNA Molecule: Synthetic oligonucleotide
utuctcacuggacagcacuaguu

SEQ ID NO: 1337 - DNA, 23 bp, Artificial Sequence
  Description of Artificial Sequence: Synthetic oligonucleotide
  Description of Combined DNA/RNA Molecule: Synthetic oligonucleotide
uaacagtcugaccauuaauaggg

SEQ ID NO: 1338 - DNA, 23 bp, Artificial Sequence
  Description of Artificial Sequence: Synthetic oligonucleotide
  Description of Combined DNA/RNA Molecule: Synthetic oligonucleotide
utugtuacccccgccauggagac

SEQ ID NO: 1339 - DNA, 23 bp, Artificial Sequence
  Description of Artificial Sequence: Synthetic oligonucleotide
  Description of Combined DNA/RNA Molecule: Synthetic oligonucleotide
atuutcauaaaaccaacucagcu

SEQ ID NO: 1340 - DNA, 23 bp, Artificial Sequence
  Description of Artificial Sequence: Synthetic oligonucleotide
  Description of Combined DNA/RNA Molecule: Synthetic oligonucleotide
uauuaucaguatuuugggcagca

SEQ ID NO: 1341 - DNA, 23 bp, Artificial Sequence
  Description of Artificial Sequence: Synthetic oligonucleotide
  Description of Combined DNA/RNA Molecule: Synthetic oligonucleotide
ugcutaccaggguccucccagcg

SEQ ID NO: 1342 - DNA, 23 bp, Artificial Sequence
  Description of Artificial Sequence: Synthetic oligonucleotide
  Description of Combined DNA/RNA Molecule: Synthetic oligonucleotide
uacututcuuctccuccacagaa

SEQ ID NO: 1343 - DNA, 23 bp, Artificial Sequence
  Description of Artificial Sequence: Synthetic oligonucleotide
  Description of Combined DNA/RNA Molecule: Synthetic oligonucleotide
utccacgucaccaauaagaagcu

SEQ ID NO: 1344 - DNA, 23 bp, Artificial Sequence
  Description of Artificial Sequence: Synthetic oligonucleotide
  Description of Combined DNA/RNA Molecule: Synthetic oligonucleotide
utaaaatgcaucuggaacaagcc

SEQ ID NO: 1345 - DNA, 23 bp, Artificial Sequence
  Description of Artificial Sequence: Synthetic oligonucleotide
  Description of Combined DNA/RNA Molecule: Synthetic oligonucleotide
aggaaaaucactacgacaaagaa

SEQ ID NO: 1346 - DNA, 23 bp, Artificial Sequence
  Description of Artificial Sequence: Synthetic oligonucleotide
  Description of Combined DNA/RNA Molecule: Synthetic oligonucleotide
atguagauggucuugucugucug

SEQ ID NO: 1347 - DNA, 23 bp, Artificial Sequence
  Description of Artificial Sequence: Synthetic oligonucleotide
  Description of Combined DNA/RNA Molecule: Synthetic oligonucleotide
atagauguaguagaauuucucug

SEQ ID NO: 1348 - DNA, 23 bp, Artificial Sequence
  Description of Artificial Sequence: Synthetic oligonucleotide
  Description of Combined DNA/RNA Molecule: Synthetic oligonucleotide
atggcatuguutcugguucucuu

SEQ ID NO: 1349 - DNA, 23 bp, Artificial Sequence
  Description of Artificial Sequence: Synthetic oligonucleotide
  Description of Combined DNA/RNA Molecule: Synthetic oligonucleotide
ucauaaagaugtcuugaccucca

SEQ ID NO: 1350 - RNA, 23 nt, Artificial Sequence
  Description of Artificial Sequence: Synthetic oligonucleotide
agaacuggagaaggagcacuccg

SEQ ID NO: 1351 - DNA, 23 bp, Artificial Sequence
  Description of Artificial Sequence: Synthetic oligonucleotide
  Description of Combined DNA/RNA Molecule: Synthetic oligonucleotide
atggguagcaaguugcaaaucuu

SEQ ID NO: 1352 - DNA, 23 bp, Artificial Sequence
  Description of Artificial Sequence: Synthetic oligonucleotide
  Description of Combined DNA/RNA Molecule: Synthetic oligonucleotide
uaagguagaggtucccugugcag

SEQ ID NO: 1353 - DNA, 23 bp, Artificial Sequence
  Description of Artificial Sequence: Synthetic oligonucleotide
  Description of Combined DNA/RNA Molecule: Synthetic oligonucleotide
atcccgcugcgcucugccugcac

SEQ ID NO: 1354 - DNA, 23 bp, Artificial Sequence
  Description of Artificial Sequence: Synthetic oligonucleotide
  Description of Combined DNA/RNA Molecule: Synthetic oligonucleotide
ucautagcugaggggaauggcaa

SEQ ID NO: 1355 - DNA, 23 bp, Artificial Sequence
  Description of Artificial Sequence: Synthetic oligonucleotide
  Description of Combined DNA/RNA Molecule: Synthetic oligonucleotide
agaaautuguuaagaagaggccc

SEQ ID NO: 1356 - DNA, 23 bp, Artificial Sequence
  Description of Artificial Sequence: Synthetic oligonucleotide
  Description of Combined DNA/RNA Molecule: Synthetic oligonucleotide
aggagataggaacuacaacgccu

SEQ ID NO: 1357 - DNA, 23 bp, Artificial Sequence
  Description of Artificial Sequence: Synthetic oligonucleotide
  Description of Combined DNA/RNA Molecule: Synthetic oligonucleotide
agaatagugcacaugaugagcau

SEQ ID NO: 1358 - DNA, 23 bp, Artificial Sequence
  Description of Artificial Sequence: Synthetic oligonucleotide
  Description of Combined DNA/RNA Molecule: Synthetic oligonucleotide
aaugaagcaautcuccucagcac

SEQ ID NO: 1359 - DNA, 23 bp, Artificial Sequence
  Description of Artificial Sequence: Synthetic oligonucleotide
  Description of Combined DNA/RNA Molecule: Synthetic oligonucleotide
utuucataaaaccaacucagcuc

SEQ ID NO: 1360 - DNA, 23 bp, Artificial Sequence
  Description of Artificial Sequence: Synthetic oligonucleotide
  Description of Combined DNA/RNA Molecule: Synthetic oligonucleotide
atccaatgcugtcugagaagcag

SEQ ID NO: 1361 - DNA, 23 bp, Artificial Sequence
  Description of Artificial Sequence: Synthetic oligonucleotide
  Description of Combined DNA/RNA Molecule: Synthetic oligonucleotide
ucugagtaagcaaucugguccuu

SEQ ID NO: 1362 - DNA, 23 bp, Artificial Sequence
  Description of Artificial Sequence: Synthetic oligonucleotide
  Description of Combined DNA/RNA Molecule: Synthetic oligonucleotide
utccggcucagcacaaccucccc

SEQ ID NO: 1363 - DNA, 23 bp, Artificial Sequence
  Description of Artificial Sequence: Synthetic oligonucleotide
  Description of Combined DNA/RNA Molecule: Synthetic oligonucleotide
ugaagaagucgtucaugugccac

SEQ ID NO: 1364 - RNA, 23 nt, Artificial Sequence
  Description of Artificial Sequence: Synthetic oligonucleotide
uaaggaaggagggauaaggccac

SEQ ID NO: 1365 - DNA, 23 bp, Artificial Sequence
  Description of Artificial Sequence: Synthetic oligonucleotide
  Description of Combined DNA/RNA Molecule: Synthetic oligonucleotide
aaacaatuaggaaauccagccaa

SEQ ID NO: 1366 - DNA, 23 bp, Artificial Sequence
  Description of Artificial Sequence: Synthetic oligonucleotide
  Description of Combined DNA/RNA Molecule: Synthetic oligonucleotide
uaaacggaagatuguuuucccuu

SEQ ID NO: 1367 - DNA, 23 bp, Artificial Sequence
  Description of Artificial Sequence: Synthetic oligonucleotide
  Description of Combined DNA/RNA Molecule: Synthetic oligonucleotide
agautatcauctuguuacccccg

SEQ ID NO: 1368 - DNA, 23 bp, Artificial Sequence
  Description of Artificial Sequence: Synthetic oligonucleotide
  Description of Combined DNA/RNA Molecule: Synthetic oligonucleotide
acautgaagcatugagacaccag

SEQ ID NO: 1369 - RNA, 23 nt, Artificial Sequence
  Description of Artificial Sequence: Synthetic oligonucleotide
aaugaagaaguccugcauuacug

SEQ ID NO: 1370 - DNA, 23 bp, Artificial Sequence
  Description of Artificial Sequence: Synthetic oligonucleotide
  Description of Combined DNA/RNA Molecule: Synthetic oligonucleotide
acugtctggaugaagagguaccc

SEQ ID NO: 1371 - RNA, 23 nt, Artificial Sequence
  Description of Artificial Sequence: Synthetic oligonucleotide
aaucagaucuuagaguuauacaa

SEQ ID NO: 1372 - DNA, 23 bp, Artificial Sequence
  Description of Artificial Sequence: Synthetic oligonucleotide
  Description of Combined DNA/RNA Molecule: Synthetic oligonucleotide
uagatatucuucuuagaggacug

SEQ ID NO: 1373 - DNA, 23 bp, Artificial Sequence
  Description of Artificial Sequence: Synthetic oligonucleotide
  Description of Combined DNA/RNA Molecule: Synthetic oligonucleotide
acuutcguucugaagggucacac

SEQ ID NO: 1374 - DNA, 23 bp, Artificial Sequence
  Description of Artificial Sequence: Synthetic oligonucleotide
  Description of Combined DNA/RNA Molecule: Synthetic oligonucleotide
uaagggtacgutgucacucacuc

SEQ ID NO: 1375 - RNA, 23 nt, Artificial Sequence
  Description of Artificial Sequence: Synthetic oligonucleotide
aaagaugggaaacuuuagcaccu

SEQ ID NO: 1376 - RNA, 23 nt, Artificial Sequence
  Description of Artificial Sequence: Synthetic oligonucleotide
ucuaggccgaacuucucccacug

SEQ ID NO: 1377 - DNA, 23 bp, Artificial Sequence
  Description of Artificial Sequence: Synthetic oligonucleotide
  Description of Combined DNA/RNA Molecule: Synthetic oligonucleotide
atucaucagaucuuagaguuaua

SEQ ID NO: 1378 - RNA, 23 nt, Artificial Sequence
  Description of Artificial Sequence: Synthetic oligonucleotide
uacgacaaagaagaucauguagg

SEQ ID NO: 1379 - DNA, 23 bp, Artificial Sequence
  Description of Artificial Sequence: Synthetic oligonucleotide
  Description of Combined DNA/RNA Molecule: Synthetic oligonucleotide
uaauacaaaautcaacagguaac

SEQ ID NO: 1380 - DNA, 23 bp, Artificial Sequence
  Description of Artificial Sequence: Synthetic oligonucleotide
  Description of Combined DNA/RNA Molecule: Synthetic oligonucleotide
utcgaaacugggcagcacguacu

SEQ ID NO: 1381 - DNA, 23 bp, Artificial Sequence
  Description of Artificial Sequence: Synthetic oligonucleotide
  Description of Combined DNA/RNA Molecule: Synthetic oligonucleotide
atuacataagacauuauccuaau

SEQ ID NO: 1382 - DNA, 23 bp, Artificial Sequence
  Description of Artificial Sequence: Synthetic oligonucleotide
  Description of Combined DNA/RNA Molecule: Synthetic oligonucleotide
uauaaaaaggatuuuggcauaga

SEQ ID NO: 1383 - RNA, 23 nt, Artificial Sequence
  Description of Artificial Sequence: Synthetic oligonucleotide
ucguaagguuuguuucacauaau

SEQ ID NO: 1384 - RNA, 23 nt, Artificial Sequence
  Description of Artificial Sequence: Synthetic oligonucleotide
ucgcauccugaaauuacaauauu

SEQ ID NO: 1385 - RNA, 23 nt, Artificial Sequence
  Description of Artificial Sequence: Synthetic oligonucleotide
acugggacauugaagcauugaga

SEQ ID NO: 1386 - RNA, 23 nt, Artificial Sequence
  Description of Artificial Sequence: Synthetic oligonucleotide
uagacucgccuccucaagugacu

SEQ ID NO: 1387 - DNA, 23 bp, Artificial Sequence
  Description of Artificial Sequence: Synthetic oligonucleotide
  Description of Combined DNA/RNA Molecule: Synthetic oligonucleotide
uccatataacutucguucugaag

SEQ ID NO: 1388 - DNA, 23 bp, Artificial Sequence
  Description of Artificial Sequence: Synthetic oligonucleotide
  Description of Combined DNA/RNA Molecule: Synthetic oligonucleotide
ugcatagacaucgcauccugaaa

SEQ ID NO: 1389 - RNA, 23 nt, Artificial Sequence
  Description of Artificial Sequence: Synthetic oligonucleotide
ugccagauccagaucuauggaaa

SEQ ID NO: 1390 - DNA, 23 bp, Artificial Sequence
  Description of Artificial Sequence: Synthetic oligonucleotide
  Description of Combined DNA/RNA Molecule: Synthetic oligonucleotide
ataagatgucaagacaauggauc

SEQ ID NO: 1391 - DNA, 23 bp, Artificial Sequence
  Description of Artificial Sequence: Synthetic oligonucleotide
  Description of Combined DNA/RNA Molecule: Synthetic oligonucleotide
atagauauucutcuuagaggacu

SEQ ID NO: 1392 - DNA, 23 bp, Artificial Sequence
  Description of Artificial Sequence: Synthetic oligonucleotide
  Description of Combined DNA/RNA Molecule: Synthetic oligonucleotide
utuggaacuugacuugcaggaaa

SEQ ID NO: 1393 - DNA, 23 bp, Artificial Sequence
  Description of Artificial Sequence: Synthetic oligonucleotide
  Description of Combined DNA/RNA Molecule: Synthetic oligonucleotide
ataaaaccaactcagcucagagg

SEQ ID NO: 1394 - DNA, 23 bp, Artificial Sequence
  Description of Artificial Sequence: Synthetic oligonucleotide
  Description of Combined DNA/RNA Molecule: Synthetic oligonucleotide
aacutucguuctgaagggucaca

SEQ ID NO: 1395 - DNA, 23 bp, Artificial Sequence
  Description of Artificial Sequence: Synthetic oligonucleotide
  Description of Combined DNA/RNA Molecule: Synthetic oligonucleotide
uguctutcauutcuucacucagu

SEQ ID NO: 1396 - DNA, 23 bp, Artificial Sequence
  Description of Artificial Sequence: Synthetic oligonucleotide
  Description of Combined DNA/RNA Molecule: Synthetic oligonucleotide
utgcaaacuagguaacuaucaaa

SEQ ID NO: 1397 - DNA, 23 bp, Artificial Sequence
  Description of Artificial Sequence: Synthetic oligonucleotide
  Description of Combined DNA/RNA Molecule: Synthetic oligonucleotide
uaagtgaagaucuugucugcaua

SEQ ID NO: 1398 - DNA, 23 bp, Artificial Sequence
  Description of Artificial Sequence: Synthetic oligonucleotide
  Description of Combined DNA/RNA Molecule: Synthetic oligonucleotide
acggtgauggutguuuuggcauc

SEQ ID NO: 1399 - DNA, 23 bp, Artificial Sequence
  Description of Artificial Sequence: Synthetic oligonucleotide
  Description of Combined DNA/RNA Molecule: Synthetic oligonucleotide
acuuggtcucutcugaucgcagg

SEQ ID NO: 1400 - DNA, 23 bp, Artificial Sequence
  Description of Artificial Sequence: Synthetic oligonucleotide
  Description of Combined DNA/RNA Molecule: Synthetic oligonucleotide
aguugatcuuuggccuuagcaug

SEQ ID NO: 1401 - DNA, 23 bp, Artificial Sequence
  Description of Artificial Sequence: Synthetic oligonucleotide
  Description of Combined DNA/RNA Molecule: Synthetic oligonucleotide
utuuauccaauauggagagcaau

SEQ ID NO: 1402 - DNA, 23 bp, Artificial Sequence
  Description of Artificial Sequence: Synthetic oligonucleotide
  Description of Combined DNA/RNA Molecule: Synthetic oligonucleotide
atgaaaccacaaaggagagcauc

SEQ ID NO: 1403 - DNA, 23 bp, Artificial Sequence
  Description of Artificial Sequence: Synthetic oligonucleotide
  Description of Combined DNA/RNA Molecule: Synthetic oligonucleotide
aggucutguacacauaguccacu

SEQ ID NO: 1404 - DNA, 23 bp, Artificial Sequence
  Description of Artificial Sequence: Synthetic oligonucleotide
  Description of Combined DNA/RNA Molecule: Synthetic oligonucleotide
aaucactuuuctucuccuccaca

SEQ ID NO: 1405 - DNA, 23 bp, Artificial Sequence
  Description of Artificial Sequence: Synthetic oligonucleotide
  Description of Combined DNA/RNA Molecule: Synthetic oligonucleotide
uaaatctugcucauguauccacc

SEQ ID NO: 1406 - DNA, 23 bp, Artificial Sequence
  Description of Artificial Sequence: Synthetic oligonucleotide
  Description of Combined DNA/RNA Molecule: Synthetic oligonucleotide
utcgaaggcauaucucucccagc

SEQ ID NO: 1407 - DNA, 23 bp, Artificial Sequence
  Description of Artificial Sequence: Synthetic oligonucleotide
  Description of Combined DNA/RNA Molecule: Synthetic oligonucleotide
aguaautguuggaguugcccacg

SEQ ID NO: 1408 - DNA, 23 bp, Artificial Sequence
  Description of Artificial Sequence: Synthetic oligonucleotide
  Description of Combined DNA/RNA Molecule: Synthetic oligonucleotide
utcaaagugaagaaugacccaaa

SEQ ID NO: 1409 - DNA, 23 bp, Artificial Sequence
  Description of Artificial Sequence: Synthetic oligonucleotide
  Description of Combined DNA/RNA Molecule: Synthetic oligonucleotide
aaaagatuccaguaaagaccaaa

SEQ ID NO: 1410 - DNA, 23 bp, Artificial Sequence
  Description of Artificial Sequence: Synthetic oligonucleotide
  Description of Combined DNA/RNA Molecule: Synthetic oligonucleotide
uauctggaagccaugucaccagu

SEQ ID NO: 1411 - DNA, 23 bp, Artificial Sequence
  Description of Artificial Sequence: Synthetic oligonucleotide
  Description of Combined DNA/RNA Molecule: Synthetic oligonucleotide
aaautatcuaugaugacaccaau

SEQ ID NO: 1412 - DNA, 23 bp, Artificial Sequence
  Description of Artificial Sequence: Synthetic oligonucleotide
  Description of Combined DNA/RNA Molecule: Synthetic oligonucleotide
uauugaagcautgagacaccaga

SEQ ID NO: 1413 - RNA, 23 nt, Artificial Sequence
  Description of Artificial Sequence: Synthetic oligonucleotide
ugaccagucgggucuuguacaca

SEQ ID NO: 1414 - DNA, 23 bp, Artificial Sequence
  Description of Artificial Sequence: Synthetic oligonucleotide
  Description of Combined DNA/RNA Molecule: Synthetic oligonucleotide
ugaaaagugaatucuccuacaca

SEQ ID NO: 1415 - DNA, 23 bp, Artificial Sequence
  Description of Artificial Sequence: Synthetic oligonucleotide
  Description of Combined DNA/RNA Molecule: Synthetic oligonucleotide
agaaaagugaatucuccuacaca

SEQ ID NO: 1416 - DNA, 23 bp, Artificial Sequence
  Description of Artificial Sequence: Synthetic oligonucleotide
  Description of Combined DNA/RNA Molecule: Synthetic oligonucleotide
ucagtaaaaguguacucgacauu

SEQ ID NO: 1417 - DNA, 23 bp, Artificial Sequence
  Description of Artificial Sequence: Synthetic oligonucleotide
  Description of Combined DNA/RNA Molecule: Synthetic oligonucleotide
acuucutauucagcacgaacacg

SEQ ID NO: 1418 - RNA, 23 nt, Artificial Sequence
  Description of Artificial Sequence: Synthetic oligonucleotide
uaaacacacucagacagaacaca

SEQ ID NO: 1419 - DNA, 23 bp, Artificial Sequence
  Description of Artificial Sequence: Synthetic oligonucleotide
  Description of Combined DNA/RNA Molecule: Synthetic oligonucleotide
atagauauuggguuuuaaacaac

SEQ ID NO: 1420 - DNA, 23 bp, Artificial Sequence
  Description of Artificial Sequence: Synthetic oligonucleotide
  Description of Combined DNA/RNA Molecule: Synthetic oligonucleotide
uccatutauucacaguuuuaaaa

SEQ ID NO: 1421 - RNA, 23 nt, Artificial Sequence
  Description of Artificial Sequence: Synthetic oligonucleotide
acuugaagcagagauagguaacc

SEQ ID NO: 1422 - RNA, 23 nt, Artificial Sequence
  Description of Artificial Sequence: Synthetic oligonucleotide
aauacaaaauucaacagguaaca

SEQ ID NO: 1423 - DNA, 23 bp, Artificial Sequence
  Description of Artificial Sequence: Synthetic oligonucleotide
  Description of Combined DNA/RNA Molecule: Synthetic oligonucleotide
utacagggcagcauuacauaaga

SEQ ID NO: 1424 - DNA, 23 bp, Artificial Sequence
  Description of Artificial Sequence: Synthetic oligonucleotide
  Description of Combined DNA/RNA Molecule: Synthetic oligonucleotide
utuatctuuuuccuugaggaaau

SEQ ID NO: 1425 - DNA, 23 bp, Artificial Sequence
  Description of Artificial Sequence: Synthetic oligonucleotide
  Description of Combined DNA/RNA Molecule: Synthetic oligonucleotide
atuctucuuautcagcacgaaca

SEQ ID NO: 1426 - RNA, 23 nt, Artificial Sequence
  Description of Artificial Sequence: Synthetic oligonucleotide
aaucaaaggacaaaauggcaaua

SEQ ID NO: 1427 - DNA, 23 bp, Artificial Sequence
  Description of Artificial Sequence: Synthetic oligonucleotide
  Description of Combined DNA/RNA Molecule: Synthetic oligonucleotide
uauuauccuaatggguagcaagu

SEQ ID NO: 1428 - DNA, 23 bp, Artificial Sequence
  Description of Artificial Sequence: Synthetic oligonucleotide
  Description of Combined DNA/RNA Molecule: Synthetic oligonucleotide
ucuagctuuucauaaaaccaacu

SEQ ID NO: 1429 - RNA, 23 nt, Artificial Sequence
  Description of Artificial Sequence: Synthetic oligonucleotide
uaucgcauccugaaauuacaaua

SEQ ID NO: 1430 - DNA, 23 bp, Artificial Sequence
  Description of Artificial Sequence: Synthetic oligonucleotide
  Description of Combined DNA/RNA Molecule: Synthetic oligonucleotide
atuaaaaugcatcuggaacaagc

SEQ ID NO: 1431 - DNA, 23 bp, Artificial Sequence
  Description of Artificial Sequence: Synthetic oligonucleotide
  Description of Combined DNA/RNA Molecule: Synthetic oligonucleotide
atgaauaaggaguguacuaaaau

SEQ ID NO: 1432 - RNA, 23 nt, Artificial Sequence
  Description of Artificial Sequence: Synthetic oligonucleotide
uaaugacccaaagaugauaaaga

SEQ ID NO: 1433 - DNA, 23 bp, Artificial Sequence
  Description of Artificial Sequence: Synthetic oligonucleotide
  Description of Combined DNA/RNA Molecule: Synthetic oligonucleotide
ucagauccagatcuauggaaaau

SEQ ID NO: 1434 - DNA, 23 bp, Artificial Sequence
  Description of Artificial Sequence: Synthetic oligonucleotide
  Description of Combined DNA/RNA Molecule: Synthetic oligonucleotide
uguaautgcaagaucuacaaaag

SEQ ID NO: 1435 - DNA, 23 bp, Artificial Sequence
  Description of Artificial Sequence: Synthetic oligonucleotide
  Description of Combined DNA/RNA Molecule: Synthetic oligonucleotide
agugaaaaaggtguucuaaaauu

SEQ ID NO: 1436 - DNA, 23 bp, Artificial Sequence
  Description of Artificial Sequence: Synthetic oligonucleotide
  Description of Combined DNA/RNA Molecule: Synthetic oligonucleotide
utaututaguuaggugaaaaagg

SEQ ID NO: 1437 - RNA, 21 nt, Artificial Sequence
  Description of Artificial Sequence: Synthetic oligonucleotide
agccugagggccaccauccuu

SEQ ID NO: 1438 - RNA, 21 nt, Artificial Sequence
  Description of Artificial Sequence: Synthetic oligonucleotide
ccugagggccaccauccucuu

SEQ ID NO: 1439 - RNA, 21 nt, Artificial Sequence
  Description of Artificial Sequence: Synthetic oligonucleotide
agggccaccauccucugccuu

SEQ ID NO: 1440 - RNA, 21 nt, Artificial Sequence
  Description of Artificial Sequence: Synthetic oligonucleotide
gugaccggguguacauacacu

SEQ ID NO: 1441 - RNA, 21 nt, Artificial Sequence
  Description of Artificial Sequence: Synthetic oligonucleotide
ccggguguacauacaccccuu

SEQ ID NO: 1442 - RNA, 21 nt, Artificial Sequence
  Description of Artificial Sequence: Synthetic oligonucleotide
cggguguacauacaccccuuu

SEQ ID NO: 1443 - RNA, 21 nt, Artificial Sequence
  Description of Artificial Sequence: Synthetic oligonucleotide
ggguguacauacaccccuucu

SEQ ID NO: 1444 - RNA, 21 nt, Artificial Sequence
  Description of Artificial Sequence: Synthetic oligonucleotide
gguguacauacaccccuuccu

SEQ ID NO: 1445 - RNA, 21 nt, Artificial Sequence
  Description of Artificial Sequence: Synthetic oligonucleotide
guguacauacaccccuuccau

SEQ ID NO: 1446 - RNA, 21 nt, Artificial Sequence
  Description of Artificial Sequence: Synthetic oligonucleotide
uguacauacaccccuuccacu

SEQ ID NO: 1447 - RNA, 21 nt, Artificial Sequence
  Description of Artificial Sequence: Synthetic oligonucleotide
guacauacaccccuuccaccu

SEQ ID NO: 1448 - RNA, 21 nt, Artificial Sequence
  Description of Artificial Sequence: Synthetic oligonucleotide
uacauacaccccuuccaccuu

SEQ ID NO: 1449 - RNA, 21 nt, Artificial Sequence
  Description of Artificial Sequence: Synthetic oligonucleotide
acauacaccccuuccaccucu

SEQ ID NO: 1450 - RNA, 21 nt, Artificial Sequence
  Description of Artificial Sequence: Synthetic oligonucleotide
cauacaccccuuccaccucgu

SEQ ID NO: 1451 - RNA, 21 nt, Artificial Sequence
  Description of Artificial Sequence: Synthetic oligonucleotide
auacaccccuuccaccucguu

SEQ ID NO: 1452 - RNA, 21 nt, Artificial Sequence
  Description of Artificial Sequence: Synthetic oligonucleotide
cccuuccaccucgucauccau

SEQ ID NO: 1453 - RNA, 21 nt, Artificial Sequence
  Description of Artificial Sequence: Synthetic oligonucleotide
ccuuccaccucgucauccacu

SEQ ID NO: 1454 - RNA, 21 nt, Artificial Sequence
  Description of Artificial Sequence: Synthetic oligonucleotide
cuuccaccucgucauccacau

SEQ ID NO: 1455 - RNA, 21 nt, Artificial Sequence
  Description of Artificial Sequence: Synthetic oligonucleotide
uuccaccucgucauccacaau

SEQ ID NO: 1456 - RNA, 21 nt, Artificial Sequence
  Description of Artificial Sequence: Synthetic oligonucleotide
uccaccucgucauccacaauu

SEQ ID NO: 1457 - RNA, 21 nt, Artificial Sequence
  Description of Artificial Sequence: Synthetic oligonucleotide
ccaccucgucauccacaaugu

SEQ ID NO: 1458 - RNA, 21 nt, Artificial Sequence
  Description of Artificial Sequence: Synthetic oligonucleotide
caccucgucauccacaaugau

SEQ ID NO: 1459 - RNA, 21 nt, Artificial Sequence
  Description of Artificial Sequence: Synthetic oligonucleotide
ccucgucauccacaaugagau

SEQ ID NO: 1460 - RNA, 21 nt, Artificial Sequence
  Description of Artificial Sequence: Synthetic oligonucleotide
cucgucauccacaaugagagu

SEQ ID NO: 1461 - RNA, 21 nt, Artificial Sequence
  Description of Artificial Sequence: Synthetic oligonucleotide
ucgucauccacaaugagaguu

SEQ ID NO: 1462 - RNA, 21 nt, Artificial Sequence
  Description of Artificial Sequence: Synthetic oligonucleotide
cgucauccacaaugagaguau

SEQ ID NO: 1463 - RNA, 21 nt, Artificial Sequence
  Description of Artificial Sequence: Synthetic oligonucleotide
gucauccacaaugagaguacu

SEQ ID NO: 1464 - RNA, 21 nt, Artificial Sequence
  Description of Artificial Sequence: Synthetic oligonucleotide
ucauccacaaugagaguaccu

SEQ ID NO: 1465 - RNA, 21 nt, Artificial Sequence
  Description of Artificial Sequence: Synthetic oligonucleotide
cauccacaaugagaguaccuu

SEQ ID NO: 1466 - RNA, 21 nt, Artificial Sequence
  Description of Artificial Sequence: Synthetic oligonucleotide
auccacaaugagaguaccugu

SEQ ID NO: 1467 - RNA, 21 nt, Artificial Sequence
  Description of Artificial Sequence: Synthetic oligonucleotide
uccacaaugagaguaccuguu

SEQ ID NO: 1468 - RNA, 21 nt, Artificial Sequence
  Description of Artificial Sequence: Synthetic oligonucleotide
ccacaaugagaguaccugugu

SEQ ID NO: 1469 - RNA, 21 nt, Artificial Sequence
  Description of Artificial Sequence: Synthetic oligonucleotide
cacaaugagaguaccugugau

SEQ ID NO: 1470 - RNA, 21 nt, Artificial Sequence
  Description of Artificial Sequence: Synthetic oligonucleotide
acaaugagaguaccugugagu

SEQ ID NO: 1471 - RNA, 21 nt, Artificial Sequence
  Description of Artificial Sequence: Synthetic oligonucleotide
caaugagaguaccugugagcu

SEQ ID NO: 1472 - RNA, 21 nt, Artificial Sequence
  Description of Artificial Sequence: Synthetic oligonucleotide
aaugagaguaccugugagcau

SEQ ID NO: 1473 - RNA, 21 nt, Artificial Sequence
  Description of Artificial Sequence: Synthetic oligonucleotide
augagaguaccugugagcagu

SEQ ID NO: 1474 - RNA, 21 nt, Artificial Sequence
  Description of Artificial Sequence: Synthetic oligonucleotide
ugagaguaccugugagcagcu

SEQ ID NO: 1475 - RNA, 21 nt, Artificial Sequence
  Description of Artificial Sequence: Synthetic oligonucleotide
gagaguaccugugagcagcuu

SEQ ID NO: 1476 - RNA, 21 nt, Artificial Sequence
  Description of Artificial Sequence: Synthetic oligonucleotide
agaguaccugugagcagcugu

SEQ ID NO: 1477 - RNA, 21 nt, Artificial Sequence
  Description of Artificial Sequence: Synthetic oligonucleotide
gaguaccugugagcagcuggu

SEQ ID NO: 1478 - RNA, 21 nt, Artificial Sequence
  Description of Artificial Sequence: Synthetic oligonucleotide
aguaccugugagcagcuggcu

SEQ ID NO: 1479 - RNA, 21 nt, Artificial Sequence
  Description of Artificial Sequence: Synthetic oligonucleotide
guaccugugagcagcuggcau

SEQ ID NO: 1480 - RNA, 21 nt, Artificial Sequence
  Description of Artificial Sequence: Synthetic oligonucleotide
uaccugugagcagcuggcaau

SEQ ID NO: 1481 - RNA, 21 nt, Artificial Sequence
  Description of Artificial Sequence: Synthetic oligonucleotide
aauggucgggaugcuggccau

SEQ ID NO: 1482 - RNA, 21 nt, Artificial Sequence
  Description of Artificial Sequence: Synthetic oligonucleotide
auggucgggaugcuggccaau

SEQ ID NO: 1483 - RNA, 21 nt, Artificial Sequence
  Description of Artificial Sequence: Synthetic oligonucleotide
uggucgggaugcuggccaacu

SEQ ID NO: 1484 - RNA, 21 nt, Artificial Sequence
  Description of Artificial Sequence: Synthetic oligonucleotide
ggucgggaugcuggccaacuu

SEQ ID NO: 1485 - RNA, 21 nt, Artificial Sequence
  Description of Artificial Sequence: Synthetic oligonucleotide
gucgggaugcuggccaacuuu

SEQ ID NO: 1486 - RNA, 21 nt, Artificial Sequence
  Description of Artificial Sequence: Synthetic oligonucleotide
ucgggaugcuggccaacuucu

SEQ ID NO: 1487 - RNA, 21 nt, Artificial Sequence
  Description of Artificial Sequence: Synthetic oligonucleotide
cgggaugcuggccaacuucuu

SEQ ID NO: 1488 - RNA, 21 nt, Artificial Sequence
  Description of Artificial Sequence: Synthetic oligonucleotide
gggaugcuggccaacuucuuu

SEQ ID NO: 1489 - RNA, 21 nt, Artificial Sequence
  Description of Artificial Sequence: Synthetic oligonucleotide
ggaugcuggccaacuucuugu

SEQ ID NO: 1490 - RNA, 21 nt, Artificial Sequence
  Description of Artificial Sequence: Synthetic oligonucleotide
gaugcuggccaacuucuuggu

SEQ ID NO: 1491 - RNA, 21 nt, Artificial Sequence
  Description of Artificial Sequence: Synthetic oligonucleotide
gcuggccaacuucuugggcuu

SEQ ID NO: 1492 - RNA, 21 nt, Artificial Sequence
  Description of Artificial Sequence: Synthetic oligonucleotide
cuggccaacuucuugggcuuu

SEQ ID NO: 1493 - RNA, 21 nt, Artificial Sequence
  Description of Artificial Sequence: Synthetic oligonucleotide
gccaacuucuugggcuuccgu

SEQ ID NO: 1494 - RNA, 21 nt, Artificial Sequence
  Description of Artificial Sequence: Synthetic oligonucleotide
ccaacuucuugggcuuccguu

SEQ ID NO: 1495 - RNA, 21 nt, Artificial Sequence
  Description of Artificial Sequence: Synthetic oligonucleotide
caacuucuugggcuuccguau

SEQ ID NO: 1496 - RNA, 21 nt, Artificial Sequence
  Description of Artificial Sequence: Synthetic oligonucleotide
aacuucuugggcuuccguauu

SEQ ID NO: 1497 - RNA, 21 nt, Artificial Sequence
  Description of Artificial Sequence: Synthetic oligonucleotide
acuucuugggcuuccguauau

SEQ ID NO: 1498 - RNA, 21 nt, Artificial Sequence
  Description of Artificial Sequence: Synthetic oligonucleotide
cuucuugggcuuccguauauu

SEQ ID NO: 1499 - RNA, 21 nt, Artificial Sequence
  Description of Artificial Sequence: Synthetic oligonucleotide
uucuugggcuuccguauauau

SEQ ID NO: 1500 - RNA, 21 nt, Artificial Sequence
  Description of Artificial Sequence: Synthetic oligonucleotide
ucuugggcuuccguauauauu

SEQ ID NO: 1501 - RNA, 21 nt, Artificial Sequence
  Description of Artificial Sequence: Synthetic oligonucleotide
cuugggcuuccguauauaugu

SEQ ID NO: 1502 - RNA, 21 nt, Artificial Sequence
  Description of Artificial Sequence: Synthetic oligonucleotide
uugggcuuccguauauauggu

SEQ ID NO: 1503 - RNA, 21 nt, Artificial Sequence
  Description of Artificial Sequence: Synthetic oligonucleotide
gggcuuccguauauauggcau

SEQ ID NO: 1504 - RNA, 21 nt, Artificial Sequence
  Description of Artificial Sequence: Synthetic oligonucleotide
ggcuuccguauauauggcauu

SEQ ID NO: 1505 - RNA, 21 nt, Artificial Sequence
  Description of Artificial Sequence: Synthetic oligonucleotide
gcuuccguauauauggcaugu

SEQ ID NO: 1506 - RNA, 21 nt, Artificial Sequence
  Description of Artificial Sequence: Synthetic oligonucleotide
uauauauggcaugcacagugu

SEQ ID NO: 1507 - RNA, 21 nt, Artificial Sequence
  Description of Artificial Sequence: Synthetic oligonucleotide
auauauggcaugcacagugau

SEQ ID NO: 1508 - RNA, 21 nt, Artificial Sequence
  Description of Artificial Sequence: Synthetic oligonucleotide
uauauggcaugcacagugagu

SEQ ID NO: 1509 - RNA, 21 nt, Artificial Sequence
  Description of Artificial Sequence: Synthetic oligonucleotide
auauggcaugcacagugagcu

SEQ ID NO: 1510 - RNA, 21 nt, Artificial Sequence
  Description of Artificial Sequence: Synthetic oligonucleotide
uauggcaugcacagugagcuu

SEQ ID NO: 1511 - RNA, 21 nt, Artificial Sequence
  Description of Artificial Sequence: Synthetic oligonucleotide
auggcaugcacagugagcuau

SEQ ID NO: 1512 - RNA, 21 nt, Artificial Sequence
  Description of Artificial Sequence: Synthetic oligonucleotide
uggcaugcacagugagcuauu

SEQ ID NO: 1513 - RNA, 21 nt, Artificial Sequence
  Description of Artificial Sequence: Synthetic oligonucleotide
ggcaugcacagugagcuaugu

SEQ ID NO: 1514 - RNA, 21 nt, Artificial Sequence
  Description of Artificial Sequence: Synthetic oligonucleotide
gcaugcacagugagcuauggu

SEQ ID NO: 1515 - RNA, 21 nt, Artificial Sequence
  Description of Artificial Sequence: Synthetic oligonucleotide
caugcacagugagcuaugggu

SEQ ID NO: 1516 - RNA, 21 nt, Artificial Sequence
  Description of Artificial Sequence: Synthetic oligonucleotide
augcacagugagcuauggggu

SEQ ID NO: 1517 - RNA, 21 nt, Artificial Sequence
  Description of Artificial Sequence: Synthetic oligonucleotide
ccucuccccaacggcugucuu

SEQ ID NO: 1518 - RNA, 21 nt, Artificial Sequence
  Description of Artificial Sequence: Synthetic oligonucleotide
uggcacccuggccucucucuu

SEQ ID NO: 1519 - RNA, 21 nt, Artificial Sequence
  Description of Artificial Sequence: Synthetic oligonucleotide
ggcacccuggccucucucuau

SEQ ID NO: 1520 - RNA, 21 nt, Artificial Sequence
  Description of Artificial Sequence: Synthetic oligonucleotide
gacaggcuacaggcaauccuu

SEQ ID NO: 1521 - RNA, 21 nt, Artificial Sequence
  Description of Artificial Sequence: Synthetic oligonucleotide
acaggcuacaggcaauccugu

SEQ ID NO: 1522 - RNA, 21 nt, Artificial Sequence
  Description of Artificial Sequence: Synthetic oligonucleotide
uuccuuggaaggacaagaacu

SEQ ID NO: 1523 - RNA, 21 nt, Artificial Sequence
  Description of Artificial Sequence: Synthetic oligonucleotide
ccuuggaaggacaagaacugu

SEQ ID NO: 1524 - RNA, 21 nt, Artificial Sequence
  Description of Artificial Sequence: Synthetic oligonucleotide
cuuggaaggacaagaacugcu

SEQ ID NO: 1525 - RNA, 21 nt, Artificial Sequence
  Description of Artificial Sequence: Synthetic oligonucleotide
caccugaagcagccguuuguu

SEQ ID NO: 1526 - RNA, 21 nt, Artificial Sequence
  Description of Artificial Sequence: Synthetic oligonucleotide
cugaagcagccguuugugcau

SEQ ID NO: 1527 - RNA, 21 nt, Artificial Sequence
  Description of Artificial Sequence: Synthetic oligonucleotide
uuugugcagggccuggcucuu

SEQ ID NO: 1528 - RNA, 21 nt, Artificial Sequence
  Description of Artificial Sequence: Synthetic oligonucleotide
uugugcagggccuggcucucu

SEQ ID NO: 1529 - RNA, 21 nt, Artificial Sequence
  Description of Artificial Sequence: Synthetic oligonucleotide
ugugcagggccuggcucucuu

SEQ ID NO: 1530 - RNA, 21 nt, Artificial Sequence
  Description of Artificial Sequence: Synthetic oligonucleotide
gugcagggccuggcucucuau

SEQ ID NO: 1531 - RNA, 21 nt, Artificial Sequence
  Description of Artificial Sequence: Synthetic oligonucleotide
ugcagggccuggcucucuauu

SEQ ID NO: 1532 - RNA, 21 nt, Artificial Sequence
  Description of Artificial Sequence: Synthetic oligonucleotide
acgcucucuggacuucacagu

SEQ ID NO: 1533 - RNA, 21 nt, Artificial Sequence
  Description of Artificial Sequence: Synthetic oligonucleotide
cgcucucuggacuucacagau

SEQ ID NO: 1534 - RNA, 21 nt, Artificial Sequence
  Description of Artificial Sequence: Synthetic oligonucleotide
cugagaagauugacagguucu

SEQ ID NO: 1535 - RNA, 21 nt, Artificial Sequence
  Description of Artificial Sequence: Synthetic oligonucleotide
ugagaagauugacagguucau

SEQ ID NO: 1536 - RNA, 21 nt, Artificial Sequence
  Description of Artificial Sequence: Synthetic oligonucleotide
gagaagauugacagguucauu

SEQ ID NO: 1537 - RNA, 21 nt, Artificial Sequence
  Description of Artificial Sequence: Synthetic oligonucleotide
agaagauugacagguucaugu

SEQ ID NO: 1538 - RNA, 21 nt, Artificial Sequence
  Description of Artificial Sequence: Synthetic oligonucleotide
gaagauugacagguucaugcu

SEQ ID NO: 1539 - RNA, 21 nt, Artificial Sequence
  Description of Artificial Sequence: Synthetic oligonucleotide
aagauugacagguucaugcau

SEQ ID NO: 1540 - RNA, 21 nt, Artificial Sequence
  Description of Artificial Sequence: Synthetic oligonucleotide
agauugacagguucaugcagu

SEQ ID NO: 1541 - RNA, 21 nt, Artificial Sequence
  Description of Artificial Sequence: Synthetic oligonucleotide
gauugacagguucaugcaggu

SEQ ID NO: 1542 - RNA, 21 nt, Artificial Sequence
  Description of Artificial Sequence: Synthetic oligonucleotide
auugacagguucaugcaggcu

SEQ ID NO: 1543 - RNA, 21 nt, Artificial Sequence
  Description of Artificial Sequence: Synthetic oligonucleotide
uugacagguucaugcaggcuu

SEQ ID NO: 1544 - RNA, 21 nt, Artificial Sequence
  Description of Artificial Sequence: Synthetic oligonucleotide
ugacagguucaugcaggcugu

SEQ ID NO: 1545 - RNA, 21 nt, Artificial Sequence
  Description of Artificial Sequence: Synthetic oligonucleotide
gacagguucaugcaggcuguu

SEQ ID NO: 1546 - RNA, 21 nt, Artificial Sequence
  Description of Artificial Sequence: Synthetic oligonucleotide
acagguucaugcaggcugugu

SEQ ID NO: 1547 - RNA, 21 nt, Artificial Sequence
  Description of Artificial Sequence: Synthetic oligonucleotide
augcaggcugugacaggaugu

SEQ ID NO: 1548 - RNA, 21 nt, Artificial Sequence
  Description of Artificial Sequence: Synthetic oligonucleotide
gcaggcugugacaggauggau

SEQ ID NO: 1549 - RNA, 21 nt, Artificial Sequence
  Description of Artificial Sequence: Synthetic oligonucleotide
caggcugugacaggauggaau

SEQ ID NO: 1550 - RNA, 21 nt, Artificial Sequence
  Description of Artificial Sequence: Synthetic oligonucleotide
gcuuucaacaccuacguccau

SEQ ID NO: 1551 - RNA, 21 nt, Artificial Sequence
  Description of Artificial Sequence: Synthetic oligonucleotide
gaguucuggguggacaacagu

SEQ ID NO: 1552 - RNA, 21 nt, Artificial Sequence
  Description of Artificial Sequence: Synthetic oligonucleotide
ggacaacagcaccucaguguu

SEQ ID NO: 1553 - RNA, 21 nt, Artificial Sequence
  Description of Artificial Sequence: Synthetic oligonucleotide
gacaacagcaccucagugucu

SEQ ID NO: 1554 - RNA, 21 nt, Artificial Sequence
  Description of Artificial Sequence: Synthetic oligonucleotide
acaacagcaccucagugucuu

SEQ ID NO: 1555 - RNA, 21 nt, Artificial Sequence
  Description of Artificial Sequence: Synthetic oligonucleotide
caacagcaccucagugucugu

SEQ ID NO: 1556 - RNA, 21 nt, Artificial Sequence
  Description of Artificial Sequence: Synthetic oligonucleotide
aacagcaccucagugucuguu

SEQ ID NO: 1557 - RNA, 21 nt, Artificial Sequence
  Description of Artificial Sequence: Synthetic oligonucleotide
augccucugaccuggacaagu

SEQ ID NO: 1558 - RNA, 21 nt, Artificial Sequence
  Description of Artificial Sequence: Synthetic oligonucleotide
aagguggagggucucacuuuu

SEQ ID NO: 1559 - RNA, 21 nt, Artificial Sequence
  Description of Artificial Sequence: Synthetic oligonucleotide
agguggagggucucacuuucu

SEQ ID NO: 1560 - RNA, 21 nt, Artificial Sequence
  Description of Artificial Sequence: Synthetic oligonucleotide
gguggagggucucacuuuccu

SEQ ID NO: 1561 - RNA, 21 nt, Artificial Sequence
  Description of Artificial Sequence: Synthetic oligonucleotide
gagggucucacuuuccagcau

SEQ ID NO: 1562 - RNA, 21 nt, Artificial Sequence
  Description of Artificial Sequence: Synthetic oligonucleotide
agggucucacuuuccagcaau

SEQ ID NO: 1563 - RNA, 21 nt, Artificial Sequence
  Description of Artificial Sequence: Synthetic oligonucleotide
ggucucacuuuccagcaaaau

SEQ ID NO: 1564 - RNA, 21 nt, Artificial Sequence
  Description of Artificial Sequence: Synthetic oligonucleotide
gucucacuuuccagcaaaacu

SEQ ID NO: 1565 - RNA, 21 nt, Artificial Sequence
  Description of Artificial Sequence: Synthetic oligonucleotide
ucucacuuuccagcaaaacuu

SEQ ID NO: 1566 - RNA, 21 nt, Artificial Sequence
  Description of Artificial Sequence: Synthetic oligonucleotide
cucacuuuccagcaaaacucu

SEQ ID NO: 1567 - RNA, 21 nt, Artificial Sequence
  Description of Artificial Sequence: Synthetic oligonucleotide
ucacuuuccagcaaaacuccu

SEQ ID NO: 1568 - RNA, 21 nt, Artificial Sequence
  Description of Artificial Sequence: Synthetic oligonucleotide
cacuuuccagcaaaacucccu

SEQ ID NO: 1569 - RNA, 21 nt, Artificial Sequence
  Description of Artificial Sequence: Synthetic oligonucleotide
acuuuccagcaaaacucccuu

SEQ ID NO: 1570 - RNA, 21 nt, Artificial Sequence
  Description of Artificial Sequence: Synthetic oligonucleotide
cuuuccagcaaaacucccucu

SEQ ID NO: 1571 - RNA, 21 nt, Artificial Sequence
  Description of Artificial Sequence: Synthetic oligonucleotide
uuuccagcaaaacucccucau

SEQ ID NO: 1572 - RNA, 21 nt, Artificial Sequence
  Description of Artificial Sequence: Synthetic oligonucleotide
uuccagcaaaacucccucaau

SEQ ID NO: 1573 - RNA, 21 nt, Artificial Sequence
  Description of Artificial Sequence: Synthetic oligonucleotide
uccagcaaaacucccucaacu

SEQ ID NO: 1574 - RNA, 21 nt, Artificial Sequence
  Description of Artificial Sequence: Synthetic oligonucleotide
ccagcaaaacucccucaacuu

SEQ ID NO: 1575 - RNA, 21 nt, Artificial Sequence
  Description of Artificial Sequence: Synthetic oligonucleotide
cagcaaaacucccucaacugu

SEQ ID NO: 1576 - RNA, 21 nt, Artificial Sequence
  Description of Artificial Sequence: Synthetic oligonucleotide
agcaaaacucccucaacuggu

SEQ ID NO: 1577 - RNA, 21 nt, Artificial Sequence
  Description of Artificial Sequence: Synthetic oligonucleotide
gcaaaacucccucaacuggau

SEQ ID NO: 1578 - RNA, 21 nt, Artificial Sequence
  Description of Artificial Sequence: Synthetic oligonucleotide
caaaacucccucaacuggauu

SEQ ID NO: 1579 - RNA, 21 nt, Artificial Sequence
  Description of Artificial Sequence: Synthetic oligonucleotide
aaaacucccucaacuggaugu

SEQ ID NO: 1580 - RNA, 21 nt, Artificial Sequence
  Description of Artificial Sequence: Synthetic oligonucleotide
aaacucccucaacuggaugau

SEQ ID NO: 1581 - RNA, 21 nt, Artificial Sequence
  Description of Artificial Sequence: Synthetic oligonucleotide
aacucccucaacuggaugaau

SEQ ID NO: 1582 - RNA, 21 nt, Artificial Sequence
  Description of Artificial Sequence: Synthetic oligonucleotide
acucccucaacuggaugaagu

SEQ ID NO: 1583 - RNA, 21 nt, Artificial Sequence
  Description of Artificial Sequence: Synthetic oligonucleotide
cucccucaacuggaugaagau

SEQ ID NO: 1584 - RNA, 21 nt, Artificial Sequence
  Description of Artificial Sequence: Synthetic oligonucleotide
ucccucaacuggaugaagaau

SEQ ID NO: 1585 - RNA, 21 nt, Artificial Sequence
  Description of Artificial Sequence: Synthetic oligonucleotide
cccucaacuggaugaagaaau

SEQ ID NO: 1586 - RNA, 21 nt, Artificial Sequence
  Description of Artificial Sequence: Synthetic oligonucleotide
ccucaacuggaugaagaaacu

SEQ ID NO: 1587 - RNA, 21 nt, Artificial Sequence
  Description of Artificial Sequence: Synthetic oligonucleotide
cucaacuggaugaagaaacuu

SEQ ID NO: 1588 - RNA, 21 nt, Artificial Sequence
  Description of Artificial Sequence: Synthetic oligonucleotide
aggaucuuaugaccugcaggu

SEQ ID NO: 1589 - RNA, 21 nt, Artificial Sequence
  Description of Artificial Sequence: Synthetic oligonucleotide
cuuaugaccugcaggaccugu

SEQ ID NO: 1590 - RNA, 21 nt, Artificial Sequence
  Description of Artificial Sequence: Synthetic oligonucleotide
cgagcugaaccugcaaaaauu

SEQ ID NO: 1591 - RNA, 21 nt, Artificial Sequence
  Description of Artificial Sequence: Synthetic oligonucleotide
gagcugaaccugcaaaaauuu

SEQ ID NO: 1592 - RNA, 21 nt, Artificial Sequence
  Description of Artificial Sequence: Synthetic oligonucleotide
agcugaaccugcaaaaauugu

SEQ ID NO: 1593 - RNA, 21 nt, Artificial Sequence
  Description of Artificial Sequence: Synthetic oligonucleotide
gcugaaccugcaaaaauugau

SEQ ID NO: 1594 - RNA, 21 nt, Artificial Sequence
  Description of Artificial Sequence: Synthetic oligonucleotide
cugaaccugcaaaaauugagu

SEQ ID NO: 1595 - RNA, 21 nt, Artificial Sequence
  Description of Artificial Sequence: Synthetic oligonucleotide
ugaaccugcaaaaauugagcu

SEQ ID NO: 1596 - RNA, 21 nt, Artificial Sequence
  Description of Artificial Sequence: Synthetic oligonucleotide
gaaccugcaaaaauugagcau

SEQ ID NO: 1597 - RNA, 21 nt, Artificial Sequence
  Description of Artificial Sequence: Synthetic oligonucleotide
aaccugcaaaaauugagcaau

SEQ ID NO: 1598 - RNA, 21 nt, Artificial Sequence
  Description of Artificial Sequence: Synthetic oligonucleotide
accugcaaaaauugagcaauu

SEQ ID NO: 1599 - RNA, 21 nt, Artificial Sequence
  Description of Artificial Sequence: Synthetic oligonucleotide
ccugcaaaaauugagcaaugu

SEQ ID NO: 1600 - RNA, 21 nt, Artificial Sequence
  Description of Artificial Sequence: Synthetic oligonucleotide
cugcaaaaauugagcaaugau

SEQ ID NO: 1601 - RNA, 21 nt, Artificial Sequence
  Description of Artificial Sequence: Synthetic oligonucleotide
ugcaaaaauugagcaaugacu

SEQ ID NO: 1602 - RNA, 21 nt, Artificial Sequence
  Description of Artificial Sequence: Synthetic oligonucleotide
gaggugcugaacagcauuuuu

SEQ ID NO: 1603 - RNA, 21 nt, Artificial Sequence
  Description of Artificial Sequence: Synthetic oligonucleotide
aggugcugaacagcauuuuuu

SEQ ID NO: 1604 - RNA, 21 nt, Artificial Sequence
  Description of Artificial Sequence: Synthetic oligonucleotide
ggugcugaacagcauuuuuuu

SEQ ID NO: 1605 - RNA, 21 nt, Artificial Sequence
  Description of Artificial Sequence: Synthetic oligonucleotide
gugcugaacagcauuuuuuuu

SEQ ID NO: 1606 - RNA, 21 nt, Artificial Sequence
  Description of Artificial Sequence: Synthetic oligonucleotide
ugcugaacagcauuuuuuuuu

SEQ ID NO: 1607 - RNA, 21 nt, Artificial Sequence
  Description of Artificial Sequence: Synthetic oligonucleotide
gcugaacagcauuuuuuuugu

SEQ ID NO: 1608 - RNA, 21 nt, Artificial Sequence
  Description of Artificial Sequence: Synthetic oligonucleotide
cugaacagcauuuuuuuugau

SEQ ID NO: 1609 - RNA, 21 nt, Artificial Sequence
  Description of Artificial Sequence: Synthetic oligonucleotide
ugagagagagcccacagaguu

SEQ ID NO: 1610 - RNA, 21 nt, Artificial Sequence
  Description of Artificial Sequence: Synthetic oligonucleotide
agagagagcccacagagucuu

SEQ ID NO: 1611 - RNA, 21 nt, Artificial Sequence
  Description of Artificial Sequence: Synthetic oligonucleotide
gagagagcccacagagucuau

SEQ ID NO: 1612 - RNA, 21 nt, Artificial Sequence
  Description of Artificial Sequence: Synthetic oligonucleotide
gaaccgcccauuccuguuugu

SEQ ID NO: 1613 - RNA, 21 nt, Artificial Sequence
  Description of Artificial Sequence: Synthetic oligonucleotide
aaccgcccauuccuguuugcu

SEQ ID NO: 1614 - RNA, 21 nt, Artificial Sequence
  Description of Artificial Sequence: Synthetic oligonucleotide
accgcccauuccuguuugcuu

SEQ ID NO: 1615 - RNA, 21 nt, Artificial Sequence
  Description of Artificial Sequence: Synthetic oligonucleotide
ccgcccauuccuguuugcugu

SEQ ID NO: 1616 - RNA, 21 nt, Artificial Sequence
  Description of Artificial Sequence: Synthetic oligonucleotide
cgcccauuccuguuugcuguu

SEQ ID NO: 1617 - RNA, 21 nt, Artificial Sequence
  Description of Artificial Sequence: Synthetic oligonucleotide
gcccauuccuguuugcugugu

SEQ ID NO: 1618 - RNA, 21 nt, Artificial Sequence
  Description of Artificial Sequence: Synthetic oligonucleotide
cccauuccuguuugcuguguu

SEQ ID NO: 1619 - RNA, 21 nt, Artificial Sequence
  Description of Artificial Sequence: Synthetic oligonucleotide
ccauuccuguuugcuguguau

SEQ ID NO: 1620 - RNA, 21 nt, Artificial Sequence
  Description of Artificial Sequence: Synthetic oligonucleotide
cauuccuguuugcuguguauu

SEQ ID NO: 1621 - RNA, 21 nt, Artificial Sequence
  Description of Artificial Sequence: Synthetic oligonucleotide
auuccuguuugcuguguaugu

SEQ ID NO: 1622 - RNA, 21 nt, Artificial Sequence
  Description of Artificial Sequence: Synthetic oligonucleotide
uuccuguuugcuguguaugau

SEQ ID NO: 1623 - RNA, 21 nt, Artificial Sequence
  Description of Artificial Sequence: Synthetic oligonucleotide
uccuguuugcuguguaugauu

SEQ ID NO: 1624 - RNA, 21 nt, Artificial Sequence
  Description of Artificial Sequence: Synthetic oligonucleotide
ccuguuugcuguguaugaucu

SEQ ID NO: 1625 - RNA, 21 nt, Artificial Sequence
  Description of Artificial Sequence: Synthetic oligonucleotide
cuguuugcuguguaugaucau

SEQ ID NO: 1626 - RNA, 21 nt, Artificial Sequence
  Description of Artificial Sequence: Synthetic oligonucleotide
uguuugcuguguaugaucaau

SEQ ID NO: 1627 - RNA, 21 nt, Artificial Sequence
  Description of Artificial Sequence: Synthetic oligonucleotide
guuugcuguguaugaucaaau

SEQ ID NO: 1628 - RNA, 21 nt, Artificial Sequence
  Description of Artificial Sequence: Synthetic oligonucleotide
uuugcuguguaugaucaaagu

SEQ ID NO: 1629 - RNA, 21 nt, Artificial Sequence
  Description of Artificial Sequence: Synthetic oligonucleotide
ccccagucucccaccuuuucu

SEQ ID NO: 1630 - RNA, 21 nt, Artificial Sequence
  Description of Artificial Sequence: Synthetic oligonucleotide
cccagucucccaccuuuucuu

SEQ ID NO: 1631 - RNA, 21 nt, Artificial Sequence
  Description of Artificial Sequence: Synthetic oligonucleotide
ccagucucccaccuuuucuuu

SEQ ID NO: 1632 - RNA, 21 nt, Artificial Sequence
  Description of Artificial Sequence: Synthetic oligonucleotide
agucucccaccuuuucuucuu

SEQ ID NO: 1633 - RNA, 21 nt, Artificial Sequence
  Description of Artificial Sequence: Synthetic oligonucleotide
gucucccaccuuuucuucuau

SEQ ID NO: 1634 - RNA, 21 nt, Artificial Sequence
  Description of Artificial Sequence: Synthetic oligonucleotide
ucucccaccuuuucuucuaau

SEQ ID NO: 1635 - RNA, 21 nt, Artificial Sequence
  Description of Artificial Sequence: Synthetic oligonucleotide
cucccaccuuuucuucuaauu

SEQ ID NO: 1636 - RNA, 21 nt, Artificial Sequence
  Description of Artificial Sequence: Synthetic oligonucleotide
ucccaccuuuucuucuaaugu

SEQ ID NO: 1637 - RNA, 21 nt, Artificial Sequence
  Description of Artificial Sequence: Synthetic oligonucleotide
cccaccuuuucuucuaaugau

SEQ ID NO: 1638 - RNA, 21 nt, Artificial Sequence
  Description of Artificial Sequence: Synthetic oligonucleotide
ccaccuuuucuucuaaugagu

SEQ ID NO: 1639 - RNA, 21 nt, Artificial Sequence
  Description of Artificial Sequence: Synthetic oligonucleotide
caccuuuucuucuaaugaguu

SEQ ID NO: 1640 - RNA, 21 nt, Artificial Sequence
  Description of Artificial Sequence: Synthetic oligonucleotide
accuuuucuucuaaugagucu

SEQ ID NO: 1641 - RNA, 21 nt, Artificial Sequence
  Description of Artificial Sequence: Synthetic oligonucleotide
ccguuucuccuuggucuaagu

SEQ ID NO: 1642 - RNA, 21 nt, Artificial Sequence
  Description of Artificial Sequence: Synthetic oligonucleotide
cguuucuccuuggucuaaguu

SEQ ID NO: 1643 - RNA, 21 nt, Artificial Sequence
  Description of Artificial Sequence: Synthetic oligonucleotide
guuucuccuuggucuaagugu

SEQ ID NO: 1644 - RNA, 21 nt, Artificial Sequence
  Description of Artificial Sequence: Synthetic oligonucleotide
guuugcuggguuuauuuuagu

SEQ ID NO: 1645 - RNA, 21 nt, Artificial Sequence
  Description of Artificial Sequence: Synthetic oligonucleotide
uuugcuggguuuauuuuagau

SEQ ID NO: 1646 - RNA, 21 nt, Artificial Sequence
  Description of Artificial Sequence: Synthetic oligonucleotide
uugcuggguuuauuuuagagu

SEQ ID NO: 1647 - RNA, 21 nt, Artificial Sequence
  Description of Artificial Sequence: Synthetic oligonucleotide
ugcuggguuuauuuuagagau

SEQ ID NO: 1648 - RNA, 21 nt, Artificial Sequence
  Description of Artificial Sequence: Synthetic oligonucleotide
gcuggguuuauuuuagagaau

SEQ ID NO: 1649 - RNA, 21 nt, Artificial Sequence
  Description of Artificial Sequence: Synthetic oligonucleotide
cuggguuuauuuuagagaauu

SEQ ID NO: 1650 - RNA, 21 nt, Artificial Sequence
  Description of Artificial Sequence: Synthetic oligonucleotide
uggguuuauuuuagagaaugu

SEQ ID NO: 1651 - RNA, 21 nt, Artificial Sequence
  Description of Artificial Sequence: Synthetic oligonucleotide
ggguuuauuuuagagaauggu

SEQ ID NO: 1652 - RNA, 21 nt, Artificial Sequence
  Description of Artificial Sequence: Synthetic oligonucleotide
gguuuauuuuagagaaugggu

SEQ ID NO: 1653 - RNA, 21 nt, Artificial Sequence
  Description of Artificial Sequence: Synthetic oligonucleotide
guuuauuuuagagaauggggu

SEQ ID NO: 1654 - RNA, 21 nt, Artificial Sequence
  Description of Artificial Sequence: Synthetic oligonucleotide
uuuauuuuagagaaugggggu

SEQ ID NO: 1655 - RNA, 21 nt, Artificial Sequence
  Description of Artificial Sequence: Synthetic oligonucleotide
agaauggggguggggaggcau

SEQ ID NO: 1656 - RNA, 21 nt, Artificial Sequence
  Description of Artificial Sequence: Synthetic oligonucleotide
gaauggggguggggaggcaau

SEQ ID NO: 1657 - RNA, 21 nt, Artificial Sequence
  Description of Artificial Sequence: Synthetic oligonucleotide
aauggggguggggaggcaagu

SEQ ID NO: 1658 - RNA, 21 nt, Artificial Sequence
  Description of Artificial Sequence: Synthetic oligonucleotide
auggggguggggaggcaagau

SEQ ID NO: 1659 - RNA, 21 nt, Artificial Sequence
  Description of Artificial Sequence: Synthetic oligonucleotide
uggggguggggaggcaagaau

SEQ ID NO: 1660 - RNA, 21 nt, Artificial Sequence
  Description of Artificial Sequence: Synthetic oligonucleotide
ggggguggggaggcaagaacu

SEQ ID NO: 1661 - RNA, 21 nt, Artificial Sequence
  Description of Artificial Sequence: Synthetic oligonucleotide
guggggaggcaagaaccaguu

SEQ ID NO: 1662 - RNA, 21 nt, Artificial Sequence
  Description of Artificial Sequence: Synthetic oligonucleotide
uggggaggcaagaaccagugu

SEQ ID NO: 1663 - RNA, 21 nt, Artificial Sequence
  Description of Artificial Sequence: Synthetic oligonucleotide
ggggaggcaagaaccaguguu

SEQ ID NO: 1664 - RNA, 21 nt, Artificial Sequence
  Description of Artificial Sequence: Synthetic oligonucleotide
gggaggcaagaaccaguguuu

SEQ ID NO: 1665 - RNA, 21 nt, Artificial Sequence
  Description of Artificial Sequence: Synthetic oligonucleotide
ggaggcaagaaccaguguuuu

SEQ ID NO: 1666 - RNA, 21 nt, Artificial Sequence
  Description of Artificial Sequence: Synthetic oligonucleotide
gaggcaagaaccaguguuuau

SEQ ID NO: 1667 - RNA, 21 nt, Artificial Sequence
  Description of Artificial Sequence: Synthetic oligonucleotide
aggcaagaaccaguguuuagu

SEQ ID NO: 1668 - RNA, 21 nt, Artificial Sequence
  Description of Artificial Sequence: Synthetic oligonucleotide
ggcaagaaccaguguuuagcu

SEQ ID NO: 1669 - RNA, 21 nt, Artificial Sequence
  Description of Artificial Sequence: Synthetic oligonucleotide
gcaagaaccaguguuuagcgu

SEQ ID NO: 1670 - RNA, 21 nt, Artificial Sequence
  Description of Artificial Sequence: Synthetic oligonucleotide
caagaaccaguguuuagcgcu

SEQ ID NO: 1671 - RNA, 21 nt, Artificial Sequence
  Description of Artificial Sequence: Synthetic oligonucleotide
aagaaccaguguuuagcgcgu

SEQ ID NO: 1672 - RNA, 21 nt, Artificial Sequence
  Description of Artificial Sequence: Synthetic oligonucleotide
agaaccaguguuuagcgcggu

SEQ ID NO: 1673 - RNA, 21 nt, Artificial Sequence
  Description of Artificial Sequence: Synthetic oligonucleotide
gaaccaguguuuagcgcgggu

SEQ ID NO: 1674 - RNA, 21 nt, Artificial Sequence
  Description of Artificial Sequence: Synthetic oligonucleotide
aaccaguguuuagcgcgggau

SEQ ID NO: 1675 - RNA, 21 nt, Artificial Sequence
  Description of Artificial Sequence: Synthetic oligonucleotide
cuguuccaaaaagaauuccau

SEQ ID NO: 1676 - RNA, 21 nt, Artificial Sequence
  Description of Artificial Sequence: Synthetic oligonucleotide
guuccaaaaagaauuccaacu

SEQ ID NO: 1677 - RNA, 21 nt, Artificial Sequence
  Description of Artificial Sequence: Synthetic oligonucleotide
uccaaaaagaauuccaaccgu

SEQ ID NO: 1678 - RNA, 21 nt, Artificial Sequence
  Description of Artificial Sequence: Synthetic oligonucleotide
ccaaaaagaauuccaaccgau

SEQ ID NO: 1679 - RNA, 21 nt, Artificial Sequence
  Description of Artificial Sequence: Synthetic oligonucleotide
caaaaagaauuccaaccgacu

SEQ ID NO: 1680 - RNA, 21 nt, Artificial Sequence
  Description of Artificial Sequence: Synthetic oligonucleotide
aaaaagaauuccaaccgaccu

SEQ ID NO: 1681 - RNA, 21 nt, Artificial Sequence
  Description of Artificial Sequence: Synthetic oligonucleotide
aaaagaauuccaaccgaccau

SEQ ID NO: 1682 - RNA, 21 nt, Artificial Sequence
  Description of Artificial Sequence: Synthetic oligonucleotide
aaagaauuccaaccgaccagu

SEQ ID NO: 1683 - RNA, 21 nt, Artificial Sequence
  Description of Artificial Sequence: Synthetic oligonucleotide
aagaauuccaaccgaccagcu

SEQ ID NO: 1684 - RNA, 21 nt, Artificial Sequence
  Description of Artificial Sequence: Synthetic oligonucleotide
agaauuccaaccgaccagcuu

SEQ ID NO: 1685 - RNA, 21 nt, Artificial Sequence
  Description of Artificial Sequence: Synthetic oligonucleotide
gaauuccaaccgaccagcuuu

SEQ ID NO: 1686 - RNA, 21 nt, Artificial Sequence
  Description of Artificial Sequence: Synthetic oligonucleotide
aauuccaaccgaccagcuugu

SEQ ID NO: 1687 - RNA, 21 nt, Artificial Sequence
  Description of Artificial Sequence: Synthetic oligonucleotide
auuccaaccgaccagcuuguu

SEQ ID NO: 1688 - RNA, 21 nt, Artificial Sequence
  Description of Artificial Sequence: Synthetic oligonucleotide
uuccaaccgaccagcuuguuu

SEQ ID NO: 1689 - RNA, 21 nt, Artificial Sequence
  Description of Artificial Sequence: Synthetic oligonucleotide
uccaaccgaccagcuuguuuu

SEQ ID NO: 1690 - RNA, 21 nt, Artificial Sequence
  Description of Artificial Sequence: Synthetic oligonucleotide
ccaaccgaccagcuuguuugu

SEQ ID NO: 1691 - RNA, 21 nt, Artificial Sequence
  Description of Artificial Sequence: Synthetic oligonucleotide
caaccgaccagcuuguuuguu

SEQ ID NO: 1692 - RNA, 21 nt, Artificial Sequence
  Description of Artificial Sequence: Synthetic oligonucleotide
aaccgaccagcuuguuugugu

SEQ ID NO: 1693 - RNA, 21 nt, Artificial Sequence
  Description of Artificial Sequence: Synthetic oligonucleotide
accgaccagcuuguuugugau

SEQ ID NO: 1694 - RNA, 21 nt, Artificial Sequence
  Description of Artificial Sequence: Synthetic oligonucleotide
ccgaccagcuuguuugugaau

SEQ ID NO: 1695 - RNA, 21 nt, Artificial Sequence
  Description of Artificial Sequence: Synthetic oligonucleotide
cgaccagcuuguuugugaaau

SEQ ID NO: 1696 - RNA, 21 nt, Artificial Sequence
  Description of Artificial Sequence: Synthetic oligonucleotide
gaccagcuuguuugugaaacu

SEQ ID NO: 1697 - RNA, 21 nt, Artificial Sequence
  Description of Artificial Sequence: Synthetic oligonucleotide
accagcuuguuugugaaacau

SEQ ID NO: 1698 - RNA, 21 nt, Artificial Sequence
  Description of Artificial Sequence: Synthetic oligonucleotide
ccagcuuguuugugaaacaau

SEQ ID NO: 1699 - RNA, 21 nt, Artificial Sequence
  Description of Artificial Sequence: Synthetic oligonucleotide
cagcuuguuugugaaacaaau

SEQ ID NO: 1700 - RNA, 21 nt, Artificial Sequence
  Description of Artificial Sequence: Synthetic oligonucleotide
agcuuguuugugaaacaaaau

SEQ ID NO: 1701 - RNA, 21 nt, Artificial Sequence
  Description of Artificial Sequence: Synthetic oligonucleotide
gcuuguuugugaaacaaaaau

SEQ ID NO: 1702 - RNA, 21 nt, Artificial Sequence
  Description of Artificial Sequence: Synthetic oligonucleotide
cuuguuugugaaacaaaaaau

SEQ ID NO: 1703 - RNA, 21 nt, Artificial Sequence
  Description of Artificial Sequence: Synthetic oligonucleotide
uuguuugugaaacaaaaaagu

SEQ ID NO: 1704 - RNA, 21 nt, Artificial Sequence
  Description of Artificial Sequence: Synthetic oligonucleotide
uguucccuuuucaaguugagu

SEQ ID NO: 1705 - RNA, 21 nt, Artificial Sequence
  Description of Artificial Sequence: Synthetic oligonucleotide
guucccuuuucaaguugagau

SEQ ID NO: 1706 - RNA, 21 nt, Artificial Sequence
  Description of Artificial Sequence: Synthetic oligonucleotide
uucccuuuucaaguugagaau

SEQ ID NO: 1707 - RNA, 21 nt, Artificial Sequence
  Description of Artificial Sequence: Synthetic oligonucleotide
caaguugagaacaaaaauugu

SEQ ID NO: 1708 - RNA, 21 nt, Artificial Sequence
  Description of Artificial Sequence: Synthetic oligonucleotide
aaguugagaacaaaaauuggu

SEQ ID NO: 1709 - RNA, 21 nt, Artificial Sequence
  Description of Artificial Sequence: Synthetic oligonucleotide
aguugagaacaaaaauugggu

SEQ ID NO: 1710 - RNA, 21 nt, Artificial Sequence
  Description of Artificial Sequence: Synthetic oligonucleotide
guugagaacaaaaauuggguu

SEQ ID NO: 1711 - RNA, 21 nt, Artificial Sequence
  Description of Artificial Sequence: Synthetic oligonucleotide
uugagaacaaaaauuggguuu

SEQ ID NO: 1712 - RNA, 21 nt, Artificial Sequence
  Description of Artificial Sequence: Synthetic oligonucleotide
ugagaacaaaaauuggguuuu

SEQ ID NO: 1713 - RNA, 21 nt, Artificial Sequence
  Description of Artificial Sequence: Synthetic oligonucleotide
gagaacaaaaauuggguuuuu

SEQ ID NO: 1714 - RNA, 21 nt, Artificial Sequence
  Description of Artificial Sequence: Synthetic oligonucleotide
agaacaaaaauuggguuuuau

SEQ ID NO: 1715 - RNA, 21 nt, Artificial Sequence
  Description of Artificial Sequence: Synthetic oligonucleotide
gaacaaaaauuggguuuuaau

SEQ ID NO: 1716 - RNA, 21 nt, Artificial Sequence
  Description of Artificial Sequence: Synthetic oligonucleotide
aguauacauuuuugcauugcu

SEQ ID NO: 1717 - RNA, 21 nt, Artificial Sequence
  Description of Artificial Sequence: Synthetic oligonucleotide
guauacauuuuugcauugccu

SEQ ID NO: 1718 - RNA, 21 nt, Artificial Sequence
  Description of Artificial Sequence: Synthetic oligonucleotide
uauacauuuuugcauugccuu

SEQ ID NO: 1719 - RNA, 21 nt, Artificial Sequence
  Description of Artificial Sequence: Synthetic oligonucleotide
auacauuuuugcauugccuuu

SEQ ID NO: 1720 - RNA, 21 nt, Artificial Sequence
  Description of Artificial Sequence: Synthetic oligonucleotide
auuuuugcauugccuucgguu

SEQ ID NO: 1721 - RNA, 21 nt, Artificial Sequence
  Description of Artificial Sequence: Synthetic oligonucleotide
uuuuugcauugccuucgguuu

SEQ ID NO: 1722 - RNA, 21 nt, Artificial Sequence
  Description of Artificial Sequence: Synthetic oligonucleotide
uuuugcauugccuucgguuuu

SEQ ID NO: 1723 - RNA, 21 nt, Artificial Sequence
  Description of Artificial Sequence: Synthetic oligonucleotide
uuugcauugccuucgguuugu

SEQ ID NO: 1724 - RNA, 21 nt, Artificial Sequence
  Description of Artificial Sequence: Synthetic oligonucleotide
uugcauugccuucgguuuguu

SEQ ID NO: 1725 - RNA, 21 nt, Artificial Sequence
  Description of Artificial Sequence: Synthetic oligonucleotide
ugcauugccuucgguuuguau

SEQ ID NO: 1726 - RNA, 21 nt, Artificial Sequence
  Description of Artificial Sequence: Synthetic oligonucleotide
gcauugccuucgguuuguauu

SEQ ID NO: 1727 - RNA, 21 nt, Artificial Sequence
  Description of Artificial Sequence: Synthetic oligonucleotide
cauugccuucgguuuguauuu

SEQ ID NO: 1728 - RNA, 21 nt, Artificial Sequence
  Description of Artificial Sequence: Synthetic oligonucleotide
auugccuucgguuuguauuuu

SEQ ID NO: 1729 - RNA, 21 nt, Artificial Sequence
  Description of Artificial Sequence: Synthetic oligonucleotide
uugccuucgguuuguauuuau

SEQ ID NO: 1730 - RNA, 21 nt, Artificial Sequence
  Description of Artificial Sequence: Synthetic oligonucleotide
ugccuucgguuuguauuuagu

SEQ ID NO: 1731 - RNA, 21 nt, Artificial Sequence
  Description of Artificial Sequence: Synthetic oligonucleotide
gccuucgguuuguauuuaguu

SEQ ID NO: 1732 - RNA, 21 nt, Artificial Sequence
  Description of Artificial Sequence: Synthetic oligonucleotide
ccuucgguuuguauuuagugu

SEQ ID NO: 1733 - RNA, 21 nt, Artificial Sequence
  Description of Artificial Sequence: Synthetic oligonucleotide
cuucgguuuguauuuaguguu

SEQ ID NO: 1734 - RNA, 21 nt, Artificial Sequence
  Description of Artificial Sequence: Synthetic oligonucleotide
uucgguuuguauuuagugucu

SEQ ID NO: 1735 - RNA, 21 nt, Artificial Sequence
  Description of Artificial Sequence: Synthetic oligonucleotide
ucgguuuguauuuagugucuu

SEQ ID NO: 1736 - RNA, 21 nt, Artificial Sequence
  Description of Artificial Sequence: Synthetic oligonucleotide
cgguuuguauuuagugucuuu

SEQ ID NO: 1737 - RNA, 21 nt, Artificial Sequence
  Description of Artificial Sequence: Synthetic oligonucleotide
gguuuguauuuagugucuugu

SEQ ID NO: 1738 - RNA, 21 nt, Artificial Sequence
  Description of Artificial Sequence: Synthetic oligonucleotide
guuuguauuuagugucuugau

SEQ ID NO: 1739 - RNA, 21 nt, Artificial Sequence
  Description of Artificial Sequence: Synthetic oligonucleotide
uuuguauuuagugucuugaau

SEQ ID NO: 1740 - RNA, 21 nt, Artificial Sequence
  Description of Artificial Sequence: Synthetic oligonucleotide
uuguauuuagugucuugaauu

SEQ ID NO: 1741 - RNA, 21 nt, Artificial Sequence
  Description of Artificial Sequence: Synthetic oligonucleotide
uguauuuagugucuugaaugu

SEQ ID NO: 1742 - RNA, 21 nt, Artificial Sequence
  Description of Artificial Sequence: Synthetic oligonucleotide
guauuuagugucuugaauguu

SEQ ID NO: 1743 - RNA, 21 nt, Artificial Sequence
  Description of Artificial Sequence: Synthetic oligonucleotide
uauuuagugucuugaauguau

SEQ ID NO: 1744 - RNA, 21 nt, Artificial Sequence
  Description of Artificial Sequence: Synthetic oligonucleotide
auuuagugucuugaauguaau

SEQ ID NO: 1745 - RNA, 21 nt, Artificial Sequence
  Description of Artificial Sequence: Synthetic oligonucleotide
uuuagugucuugaauguaagu

SEQ ID NO: 1746 - RNA, 21 nt, Artificial Sequence
  Description of Artificial Sequence: Synthetic oligonucleotide
uuagugucuugaauguaagau

SEQ ID NO: 1747 - RNA, 21 nt, Artificial Sequence
  Description of Artificial Sequence: Synthetic oligonucleotide
uagugucuugaauguaagaau

SEQ ID NO: 1748 - RNA, 21 nt, Artificial Sequence
  Description of Artificial Sequence: Synthetic oligonucleotide
agugucuugaauguaagaacu

SEQ ID NO: 1749 - RNA, 21 nt, Artificial Sequence
  Description of Artificial Sequence: Synthetic oligonucleotide
ugucuugaauguaagaacauu

SEQ ID NO: 1750 - RNA, 21 nt, Artificial Sequence
  Description of Artificial Sequence: Synthetic oligonucleotide
gucuugaauguaagaacaugu

SEQ ID NO: 1751 - RNA, 21 nt, Artificial Sequence
  Description of Artificial Sequence: Synthetic oligonucleotide
uugaauguaagaacaugaccu

SEQ ID NO: 1752 - RNA, 21 nt, Artificial Sequence
  Description of Artificial Sequence: Synthetic oligonucleotide
guaagaacaugaccuccgugu

SEQ ID NO: 1753 - RNA, 21 nt, Artificial Sequence
  Description of Artificial Sequence: Synthetic oligonucleotide
uaagaacaugaccuccguguu

SEQ ID NO: 1754 - RNA, 21 nt, Artificial Sequence
  Description of Artificial Sequence: Synthetic oligonucleotide
aagaacaugaccuccguguau

SEQ ID NO: 1755 - RNA, 21 nt, Artificial Sequence
  Description of Artificial Sequence: Synthetic oligonucleotide
agaacaugaccuccguguagu

SEQ ID NO: 1756 - RNA, 21 nt, Artificial Sequence
  Description of Artificial Sequence: Synthetic oligonucleotide
gaacaugaccuccguguaguu

SEQ ID NO: 1757 - RNA, 21 nt, Artificial Sequence
  Description of Artificial Sequence: Synthetic oligonucleotide
aacaugaccuccguguagugu

SEQ ID NO: 1758 - RNA, 21 nt, Artificial Sequence
  Description of Artificial Sequence: Synthetic oligonucleotide
acaugaccuccguguaguguu

SEQ ID NO: 1759 - RNA, 21 nt, Artificial Sequence
  Description of Artificial Sequence: Synthetic oligonucleotide
caugaccuccguguagugucu

SEQ ID NO: 1760 - RNA, 21 nt, Artificial Sequence
  Description of Artificial Sequence: Synthetic oligonucleotide
augaccuccguguagugucuu

SEQ ID NO: 1761 - RNA, 21 nt, Artificial Sequence
  Description of Artificial Sequence: Synthetic oligonucleotide
cuuaguuuuuuccacagaugu

SEQ ID NO: 1762 - RNA, 21 nt, Artificial Sequence
  Description of Artificial Sequence: Synthetic oligonucleotide
uuaguuuuuuccacagaugcu

SEQ ID NO: 1763 - RNA, 21 nt, Artificial Sequence
  Description of Artificial Sequence: Synthetic oligonucleotide
uaguuuuuuccacagaugcuu

SEQ ID NO: 1764 - RNA, 21 nt, Artificial Sequence
  Description of Artificial Sequence: Synthetic oligonucleotide
guuuuuuccacagaugcuugu

SEQ ID NO: 1765 - RNA, 21 nt, Artificial Sequence
  Description of Artificial Sequence: Synthetic oligonucleotide
uuuuuccacagaugcuugugu

SEQ ID NO: 1766 - RNA, 21 nt, Artificial Sequence
  Description of Artificial Sequence: Synthetic oligonucleotide
uuuuccacagaugcuugugau

SEQ ID NO: 1767 - RNA, 21 nt, Artificial Sequence
  Description of Artificial Sequence: Synthetic oligonucleotide
uuuccacagaugcuugugauu

SEQ ID NO: 1768 - RNA, 21 nt, Artificial Sequence
  Description of Artificial Sequence: Synthetic oligonucleotide
uuccacagaugcuugugauuu

SEQ ID NO: 1769 - RNA, 21 nt, Artificial Sequence
  Description of Artificial Sequence: Synthetic oligonucleotide
uccacagaugcuugugauuuu

SEQ ID NO: 1770 - RNA, 21 nt, Artificial Sequence
  Description of Artificial Sequence: Synthetic oligonucleotide
ccacagaugcuugugauuuuu

SEQ ID NO: 1771 - RNA, 21 nt, Artificial Sequence
  Description of Artificial Sequence: Synthetic oligonucleotide
cacagaugcuugugauuuuuu

SEQ ID NO: 1772 - RNA, 21 nt, Artificial Sequence
  Description of Artificial Sequence: Synthetic oligonucleotide
accugaauuucuguuugaauu

SEQ ID NO: 1773 - RNA, 21 nt, Artificial Sequence
  Description of Artificial Sequence: Synthetic oligonucleotide
ccugaauuucuguuugaaugu

SEQ ID NO: 1774 - RNA, 21 nt, Artificial Sequence
  Description of Artificial Sequence: Synthetic oligonucleotide
ggaaccauagcugguuauuuu

SEQ ID NO: 1775 - RNA, 21 nt, Artificial Sequence
  Description of Artificial Sequence: Synthetic oligonucleotide
gaaccauagcugguuauuucu

SEQ ID NO: 1776 - RNA, 21 nt, Artificial Sequence
  Description of Artificial Sequence: Synthetic oligonucleotide
aaccauagcugguuauuucuu

SEQ ID NO: 1777 - RNA, 21 nt, Artificial Sequence
  Description of Artificial Sequence: Synthetic oligonucleotide
accauagcugguuauuucucu

SEQ ID NO: 1778 - RNA, 21 nt, Artificial Sequence
  Description of Artificial Sequence: Synthetic oligonucleotide
ccauagcugguuauuucuccu

SEQ ID NO: 1779 - RNA, 21 nt, Artificial Sequence
  Description of Artificial Sequence: Synthetic oligonucleotide
ccuuguguuaguaauaaacgu

SEQ ID NO: 1780 - RNA, 21 nt, Artificial Sequence
  Description of Artificial Sequence: Synthetic oligonucleotide
cuuguguuaguaauaaacguu

SEQ ID NO: 1781 - RNA, 21 nt, Artificial Sequence
  Description of Artificial Sequence: Synthetic oligonucleotide
uuguguuaguaauaaacgucu

SEQ ID NO: 1782 - RNA, 21 nt, Artificial Sequence
  Description of Artificial Sequence: Synthetic oligonucleotide
uguguuaguaauaaacgucuu

SEQ ID NO: 1783 - RNA, 21 nt, Artificial Sequence
  Description of Artificial Sequence: Synthetic oligonucleotide
guguuaguaauaaacgucuuu

SEQ ID NO: 1784 - RNA, 21 nt, Artificial Sequence
  Description of Artificial Sequence: Synthetic oligonucleotide
uguuaguaauaaacgucuugu

SEQ ID NO: 1785 - RNA, 21 nt, Artificial Sequence
  Description of Artificial Sequence: Synthetic oligonucleotide
guuaguaauaaacgucuugcu

SEQ ID NO: 1786 - RNA, 23 nt, Artificial Sequence
  Description of Artificial Sequence: Synthetic oligonucleotide
aaggaugguggcccucaggcuca

SEQ ID NO: 1787 - RNA, 23 nt, Artificial Sequence
  Description of Artificial Sequence: Synthetic oligonucleotide
aagaggaugguggcccucaggcu

SEQ ID NO: 1788 - DNA, 23 bp, Artificial Sequence
  Description of Artificial Sequence: Synthetic oligonucleotide
  Description of Combined DNA/RNA Molecule: Synthetic oligonucleotide
aaggcagaggatgguggcccuca

SEQ ID NO: 1789 - DNA, 23 bp, Artificial Sequence
  Description of Artificial Sequence: Synthetic oligonucleotide
  Description of Combined DNA/RNA Molecule: Synthetic oligonucleotide
agugtatguacacccggucaccu

SEQ ID NO: 1790 - DNA, 23 bp, Artificial Sequence
  Description of Artificial Sequence: Synthetic oligonucleotide
  Description of Combined DNA/RNA Molecule: Synthetic oligonucleotide
aaggggtguauguacacccgguc

SEQ ID NO: 1791 - DNA, 23 bp, Artificial Sequence
  Description of Artificial Sequence: Synthetic oligonucleotide
  Description of Combined DNA/RNA Molecule: Synthetic oligonucleotide
aaagggguguatguacacccggu

SEQ ID NO: 1792 - RNA, 23 nt, Artificial Sequence
  Description of Artificial Sequence: Synthetic oligonucleotide
agaagggguguauguacacccgg

SEQ ID NO: 1793 - DNA, 23 bp, Artificial Sequence
  Description of Artificial Sequence: Synthetic oligonucleotide
  Description of Combined DNA/RNA Molecule: Synthetic oligonucleotide
aggaaggggugtauguacacccg

SEQ ID NO: 1794 - DNA, 23 bp, Artificial Sequence
  Description of Artificial Sequence: Synthetic oligonucleotide
  Description of Combined DNA/RNA Molecule: Synthetic oligonucleotide
atggaagggguguauguacaccc

SEQ ID NO: 1795 - DNA, 23 bp, Artificial Sequence
  Description of Artificial Sequence: Synthetic oligonucleotide
  Description of Combined DNA/RNA Molecule: Synthetic oligonucleotide
aguggaaggggtguauguacacc

SEQ ID NO: 1796 - RNA, 23 nt, Artificial Sequence
  Description of Artificial Sequence: Synthetic oligonucleotide
agguggaagggguguauguacac

SEQ ID NO: 1797 - DNA, 23 bp, Artificial Sequence
  Description of Artificial Sequence: Synthetic oligonucleotide
  Description of Combined DNA/RNA Molecule: Synthetic oligonucleotide
aaggtggaagggguguauguaca

SEQ ID NO: 1798 - RNA, 23 nt, Artificial Sequence
  Description of Artificial Sequence: Synthetic oligonucleotide
agagguggaagggguguauguac

SEQ ID NO: 1799 - DNA, 23 bp, Artificial Sequence
  Description of Artificial Sequence: Synthetic oligonucleotide
  Description of Combined DNA/RNA Molecule: Synthetic oligonucleotide
acgaggtggaagggguguaugua

SEQ ID NO: 1800 - RNA, 23 nt, Artificial Sequence
  Description of Artificial Sequence: Synthetic oligonucleotide
aacgagguggaagggguguaugu

SEQ ID NO: 1801 - DNA, 23 bp, Artificial Sequence
  Description of Artificial Sequence: Synthetic oligonucleotide
  Description of Combined DNA/RNA Molecule: Synthetic oligonucleotide
atggaugacgagguggaaggggu

SEQ ID NO: 1802 - DNA, 23 bp, Artificial Sequence
  Description of Artificial Sequence: Synthetic oligonucleotide
  Description of Combined DNA/RNA Molecule: Synthetic oligonucleotide
aguggatgacgagguggaagggg

SEQ ID NO: 1803 - DNA, 23 bp, Artificial Sequence
  Description of Artificial Sequence: Synthetic oligonucleotide
  Description of Combined DNA/RNA Molecule: Synthetic oligonucleotide
atguggaugacgagguggaaggg

SEQ ID NO: 1804 - DNA, 23 bp, Artificial Sequence
  Description of Artificial Sequence: Synthetic oligonucleotide
  Description of Combined DNA/RNA Molecule: Synthetic oligonucleotide
atugtggaugacgagguggaagg

SEQ ID NO: 1805 - RNA, 23 nt, Artificial Sequence
  Description of Artificial Sequence: Synthetic oligonucleotide
aauuguggaugacgagguggaag

SEQ ID NO: 1806 - DNA, 23 bp, Artificial Sequence
  Description of Artificial Sequence: Synthetic oligonucleotide
  Description of Combined DNA/RNA Molecule: Synthetic oligonucleotide
acautgtggaugacgagguggaa

SEQ ID NO: 1807 - DNA, 23 bp, Artificial Sequence
  Description of Artificial Sequence: Synthetic oligonucleotide
  Description of Combined DNA/RNA Molecule: Synthetic oligonucleotide
atcatuguggatgacgaggugga

SEQ ID NO: 1808 - DNA, 23 bp, Artificial Sequence
  Description of Artificial Sequence: Synthetic oligonucleotide
  Description of Combined DNA/RNA Molecule: Synthetic oligonucleotide
atcucatuguggaugacgaggug

SEQ ID NO: 1809 - DNA, 23 bp, Artificial Sequence
  Description of Artificial Sequence: Synthetic oligonucleotide
  Description of Combined DNA/RNA Molecule: Synthetic oligonucleotide
acuctcauuguggaugacgaggu

SEQ ID NO: 1810 - DNA, 23 bp, Artificial Sequence
  Description of Artificial Sequence: Synthetic oligonucleotide
  Description of Combined DNA/RNA Molecule: Synthetic oligonucleotide
aacucucauugtggaugacgagg

SEQ ID NO: 1811 - DNA, 23 bp, Artificial Sequence
  Description of Artificial Sequence: Synthetic oligonucleotide
  Description of Combined DNA/RNA Molecule: Synthetic oligonucleotide
atactctcauuguggaugacgag

SEQ ID NO: 1812 - DNA, 23 bp, Artificial Sequence
  Description of Artificial Sequence: Synthetic oligonucleotide
  Description of Combined DNA/RNA Molecule: Synthetic oligonucleotide
aguacucucautguggaugacga

SEQ ID NO: 1813 - DNA, 23 bp, Artificial Sequence
  Description of Artificial Sequence: Synthetic oligonucleotide
  Description of Combined DNA/RNA Molecule: Synthetic oligonucleotide
agguactcucatuguggaugacg

SEQ ID NO: 1814 - DNA, 23 bp, Artificial Sequence
  Description of Artificial Sequence: Synthetic oligonucleotide
  Description of Combined DNA/RNA Molecule: Synthetic oligonucleotide
aaggtacucucauuguggaugac

SEQ ID NO: 1815 - RNA, 23 nt, Artificial Sequence
  Description of Artificial Sequence: Synthetic oligonucleotide
acagguacucucauuguggauga

SEQ ID NO: 1816 - DNA, 23 bp, Artificial Sequence
  Description of Artificial Sequence: Synthetic oligonucleotide
  Description of Combined DNA/RNA Molecule: Synthetic oligonucleotide
aacaggtacuctcauuguggaug

SEQ ID NO: 1817 - RNA, 23 nt, Artificial Sequence
  Description of Artificial Sequence: Synthetic oligonucleotide
acacagguacucucauuguggau

SEQ ID NO: 1818 - DNA, 23 bp, Artificial Sequence
  Description of Artificial Sequence: Synthetic oligonucleotide
  Description of Combined DNA/RNA Molecule: Synthetic oligonucleotide
atcacagguactcucauugugga

SEQ ID NO: 1819 - RNA, 23 nt, Artificial Sequence
  Description of Artificial Sequence: Synthetic oligonucleotide
acucacagguacucucauugugg

SEQ ID NO: 1820 - RNA, 23 nt, Artificial Sequence
  Description of Artificial Sequence: Synthetic oligonucleotide
agcucacagguacucucauugug

SEQ ID NO: 1821 - DNA, 23 bp, Artificial Sequence
  Description of Artificial Sequence: Synthetic oligonucleotide
  Description of Combined DNA/RNA Molecule: Synthetic oligonucleotide
atgctcacaggtacucucauugu

SEQ ID NO: 1822 - RNA, 23 nt, Artificial Sequence
  Description of Artificial Sequence: Synthetic oligonucleotide
acugcucacagguacucucauug

SEQ ID NO: 1823 - DNA, 23 bp, Artificial Sequence
  Description of Artificial Sequence: Synthetic oligonucleotide
  Description of Combined DNA/RNA Molecule: Synthetic oligonucleotide
agcugctcacagguacucucauu

SEQ ID NO: 1824 - DNA, 23 bp, Artificial Sequence
  Description of Artificial Sequence: Synthetic oligonucleotide
  Description of Combined DNA/RNA Molecule: Synthetic oligonucleotide
aagctgcucacagguacucucau

SEQ ID NO: 1825 - RNA, 23 nt, Artificial Sequence
  Description of Artificial Sequence: Synthetic oligonucleotide
acagcugcucacagguacucuca

SEQ ID NO: 1826 - DNA, 23 bp, Artificial Sequence
  Description of Artificial Sequence: Synthetic oligonucleotide
  Description of Combined DNA/RNA Molecule: Synthetic oligonucleotide
accagctgcucacagguacucuc

SEQ ID NO: 1827 - RNA, 23 nt, Artificial Sequence
  Description of Artificial Sequence: Synthetic oligonucleotide
agccagcugcucacagguacucu

SEQ ID NO: 1828 - DNA, 23 bp, Artificial Sequence
  Description of Artificial Sequence: Synthetic oligonucleotide
  Description of Combined DNA/RNA Molecule: Synthetic oligonucleotide
atgccagcugctcacagguacuc

SEQ ID NO: 1829 - DNA, 23 bp, Artificial Sequence
  Description of Artificial Sequence: Synthetic oligonucleotide
  Description of Combined DNA/RNA Molecule: Synthetic oligonucleotide
atugccagcugcucacagguacu

SEQ ID NO: 1830 - DNA, 23 bp, Artificial Sequence
  Description of Artificial Sequence: Synthetic oligonucleotide
  Description of Combined DNA/RNA Molecule: Synthetic oligonucleotide
atggccagcaucccgaccauugc

SEQ ID NO: 1831 - DNA, 23 bp, Artificial Sequence
  Description of Artificial Sequence: Synthetic oligonucleotide
  Description of Combined DNA/RNA Molecule: Synthetic oligonucleotide
atuggccagcatcccgaccauug

SEQ ID NO: 1832 - RNA, 23 nt, Artificial Sequence
  Description of Artificial Sequence: Synthetic oligonucleotide
aguuggccagcaucccgaccauu

SEQ ID NO: 1833 - DNA, 23 bp, Artificial Sequence
  Description of Artificial Sequence: Synthetic oligonucleotide
  Description of Combined DNA/RNA Molecule: Synthetic oligonucleotide
aagutggccagcaucccgaccau

SEQ ID NO: 1834 - DNA, 23 bp, Artificial Sequence
  Description of Artificial Sequence: Synthetic oligonucleotide
  Description of Combined DNA/RNA Molecule: Synthetic oligonucleotide
aaagtuggccagcaucccgacca

SEQ ID NO: 1835 - DNA, 23 bp, Artificial Sequence
  Description of Artificial Sequence: Synthetic oligonucleotide
  Description of Combined DNA/RNA Molecule: Synthetic oligonucleotide
agaagutggccagcaucccgacc

SEQ ID NO: 1836 - DNA, 23 bp, Artificial Sequence
  Description of Artificial Sequence: Synthetic oligonucleotide
  Description of Combined DNA/RNA Molecule: Synthetic oligonucleotide
aagaagtuggccagcaucccgac

SEQ ID NO: 1837 - RNA, 23 nt, Artificial Sequence
  Description of Artificial Sequence: Synthetic oligonucleotide
aaagaaguuggccagcaucccga

SEQ ID NO: 1838 - RNA, 23 nt, Artificial Sequence
  Description of Artificial Sequence: Synthetic oligonucleotide
acaagaaguuggccagcaucccg

SEQ ID NO: 1839 - RNA, 23 nt, Artificial Sequence
  Description of Artificial Sequence: Synthetic oligonucleotide
accaagaaguuggccagcauccc

SEQ ID NO: 1840 - RNA, 23 nt, Artificial Sequence
  Description of Artificial Sequence: Synthetic oligonucleotide
aagcccaagaaguuggccagcau

SEQ ID NO: 1841 - RNA, 23 nt, Artificial Sequence
  Description of Artificial Sequence: Synthetic oligonucleotide
aaagcccaagaaguuggccagca

SEQ ID NO: 1842 - RNA, 23 nt, Artificial Sequence
  Description of Artificial Sequence: Synthetic oligonucleotide
acggaagcccaagaaguuggcca

SEQ ID NO: 1843 - RNA, 23 nt, Artificial Sequence
  Description of Artificial Sequence: Synthetic oligonucleotide
aacggaagcccaagaaguuggcc

SEQ ID NO: 1844 - DNA, 23 bp, Artificial Sequence
  Description of Artificial Sequence: Synthetic oligonucleotide
  Description of Combined DNA/RNA Molecule: Synthetic oligonucleotide
atacggaagcccaagaaguuggc

SEQ ID NO: 1845 - RNA, 23 nt, Artificial Sequence
  Description of Artificial Sequence: Synthetic oligonucleotide
aauacggaagcccaagaaguugg

SEQ ID NO: 1846 - DNA, 23 bp, Artificial Sequence
  Description of Artificial Sequence: Synthetic oligonucleotide
  Description of Combined DNA/RNA Molecule: Synthetic oligonucleotide
atauacggaagcccaagaaguug

SEQ ID NO: 1847 - DNA, 23 bp, Artificial Sequence
  Description of Artificial Sequence: Synthetic oligonucleotide
  Description of Combined DNA/RNA Molecule: Synthetic oligonucleotide
aauatacggaagcccaagaaguu

SEQ ID NO: 1848 - DNA, 23 bp, Artificial Sequence
  Description of Artificial Sequence: Synthetic oligonucleotide
  Description of Combined DNA/RNA Molecule: Synthetic oligonucleotide
atauauacggaagcccaagaagu

SEQ ID NO: 1849 - DNA, 23 bp, Artificial Sequence
  Description of Artificial Sequence: Synthetic oligonucleotide
  Description of Combined DNA/RNA Molecule: Synthetic oligonucleotide
aauatatacggaagcccaagaag

SEQ ID NO: 1850 - RNA, 23 nt, Artificial Sequence
  Description of Artificial Sequence: Synthetic oligonucleotide
acauauauacggaagcccaagaa

SEQ ID NO: 1851 - DNA, 23 bp, Artificial Sequence
  Description of Artificial Sequence: Synthetic oligonucleotide
  Description of Combined DNA/RNA Molecule: Synthetic oligonucleotide
accatatauacggaagcccaaga

SEQ ID NO: 1852 - DNA, 23 bp, Artificial Sequence
  Description of Artificial Sequence: Synthetic oligonucleotide
  Description of Combined DNA/RNA Molecule: Synthetic oligonucleotide
atgccatauauacggaagcccaa

SEQ ID NO: 1853 - DNA, 23 bp, Artificial Sequence
  Description of Artificial Sequence: Synthetic oligonucleotide
  Description of Combined DNA/RNA Molecule: Synthetic oligonucleotide
aaugccauauatacggaagccca

SEQ ID NO: 1854 - RNA, 23 nt, Artificial Sequence
  Description of Artificial Sequence: Synthetic oligonucleotide
acaugccauauauacggaagccc

SEQ ID NO: 1855 - DNA, 23 bp, Artificial Sequence
  Description of Artificial Sequence: Synthetic oligonucleotide
  Description of Combined DNA/RNA Molecule: Synthetic oligonucleotide
acactgtgcaugccauauauacg

SEQ ID NO: 1856 - DNA, 23 bp, Artificial Sequence
  Description of Artificial Sequence: Synthetic oligonucleotide
  Description of Combined DNA/RNA Molecule: Synthetic oligonucleotide
atcacugugcatgccauauauac

SEQ ID NO: 1857 - DNA, 23 bp, Artificial Sequence
  Description of Artificial Sequence: Synthetic oligonucleotide
  Description of Combined DNA/RNA Molecule: Synthetic oligonucleotide
acucactgugcaugccauauaua

SEQ ID NO: 1858 - RNA, 23 nt, Artificial Sequence
  Description of Artificial Sequence: Synthetic oligonucleotide
agcucacugugcaugccauauau

SEQ ID NO: 1859 - DNA, 23 bp, Artificial Sequence
  Description of Artificial Sequence: Synthetic oligonucleotide
  Description of Combined DNA/RNA Molecule: Synthetic oligonucleotide
aagctcacugugcaugccauaua

SEQ ID NO: 1860 - DNA, 23 bp, Artificial Sequence
  Description of Artificial Sequence: Synthetic oligonucleotide
  Description of Combined DNA/RNA Molecule: Synthetic oligonucleotide
atagcucacugtgcaugccauau

SEQ ID NO: 1861 - DNA, 23 bp, Artificial Sequence
  Description of Artificial Sequence: Synthetic oligonucleotide
  Description of Combined DNA/RNA Molecule: Synthetic oligonucleotide
aauagctcacugugcaugccaua

SEQ ID NO: 1862 - DNA, 23 bp, Artificial Sequence
  Description of Artificial Sequence: Synthetic oligonucleotide
  Description of Combined DNA/RNA Molecule: Synthetic oligonucleotide
acauagcucactgugcaugccau

SEQ ID NO: 1863 - DNA, 23 bp, Artificial Sequence
  Description of Artificial Sequence: Synthetic oligonucleotide
  Description of Combined DNA/RNA Molecule: Synthetic oligonucleotide
accatagcucacugugcaugcca

SEQ ID NO: 1864 - RNA, 23 nt, Artificial Sequence
  Description of Artificial Sequence: Synthetic oligonucleotide
acccauagcucacugugcaugcc

SEQ ID NO: 1865 - DNA, 23 bp, Artificial Sequence
  Description of Artificial Sequence: Synthetic oligonucleotide
  Description of Combined DNA/RNA Molecule: Synthetic oligonucleotide
accccatagcucacugugcaugc

SEQ ID NO: 1866 - DNA, 23 bp, Artificial Sequence
  Description of Artificial Sequence: Synthetic oligonucleotide
  Description of Combined DNA/RNA Molecule: Synthetic oligonucleotide
aagacagccgutggggagaggac

SEQ ID NO: 1867 - RNA, 23 nt, Artificial Sequence
  Description of Artificial Sequence: Synthetic oligonucleotide
aagagagaggccagggugccaaa

SEQ ID NO: 1868 - DNA, 23 bp, Artificial Sequence
  Description of Artificial Sequence: Synthetic oligonucleotide
  Description of Combined DNA/RNA Molecule: Synthetic oligonucleotide
atagagagaggccagggugccaa

SEQ ID NO: 1869 - DNA, 23 bp, Artificial Sequence
  Description of Artificial Sequence: Synthetic oligonucleotide
  Description of Combined DNA/RNA Molecule: Synthetic oligonucleotide
aaggautgccuguagccugucag

SEQ ID NO: 1870 - DNA, 23 bp, Artificial Sequence
  Description of Artificial Sequence: Synthetic oligonucleotide
  Description of Combined DNA/RNA Molecule: Synthetic oligonucleotide
acaggatugcctguagccuguca

SEQ ID NO: 1871 - DNA, 23 bp, Artificial Sequence
  Description of Artificial Sequence: Synthetic oligonucleotide
  Description of Combined DNA/RNA Molecule: Synthetic oligonucleotide
aguucutgucctuccaaggaaca

SEQ ID NO: 1872 - DNA, 23 bp, Artificial Sequence
  Description of Artificial Sequence: Synthetic oligonucleotide
  Description of Combined DNA/RNA Molecule: Synthetic oligonucleotide
acagtucuuguccuuccaaggaa

SEQ ID NO: 1873 - DNA, 23 bp, Artificial Sequence
  Description of Artificial Sequence: Synthetic oligonucleotide
  Description of Combined DNA/RNA Molecule: Synthetic oligonucleotide
agcagutcuugtccuuccaagga

SEQ ID NO: 1874 - RNA, 23 nt, Artificial Sequence
  Description of Artificial Sequence: Synthetic oligonucleotide
aacaaacggcugcuucaggugca

SEQ ID NO: 1875 - DNA, 23 bp, Artificial Sequence
  Description of Artificial Sequence: Synthetic oligonucleotide
  Description of Combined DNA/RNA Molecule: Synthetic oligonucleotide
atgcacaaacggcugcuucaggu

SEQ ID NO: 1876 - RNA, 23 nt, Artificial Sequence
  Description of Artificial Sequence: Synthetic oligonucleotide
aagagccaggcccugcacaaacg

SEQ ID NO: 1877 - RNA, 23 nt, Artificial Sequence
  Description of Artificial Sequence: Synthetic oligonucleotide
agagagccaggcccugcacaaac

SEQ ID NO: 1878 - RNA, 23 nt, Artificial Sequence
  Description of Artificial Sequence: Synthetic oligonucleotide
aagagagccaggcccugcacaaa

SEQ ID NO: 1879 - DNA, 23 bp, Artificial Sequence
  Description of Artificial Sequence: Synthetic oligonucleotide
  Description of Combined DNA/RNA Molecule: Synthetic oligonucleotide
atagagagccaggcccugcacaa

SEQ ID NO: 1880 - RNA, 23 nt, Artificial Sequence
  Description of Artificial Sequence: Synthetic oligonucleotide
aauagagagccaggcccugcaca

SEQ ID NO: 1881 - DNA, 23 bp, Artificial Sequence
  Description of Artificial Sequence: Synthetic oligonucleotide
  Description of Combined DNA/RNA Molecule: Synthetic oligonucleotide
acugtgaaguccagagagcgugg

SEQ ID NO: 1882 - DNA, 23 bp, Artificial Sequence
  Description of Artificial Sequence: Synthetic oligonucleotide
  Description of Combined DNA/RNA Molecule: Synthetic oligonucleotide
atcugugaaguccagagagcgug

SEQ ID NO: 1883 - DNA, 23 bp, Artificial Sequence
  Description of Artificial Sequence: Synthetic oligonucleotide
  Description of Combined DNA/RNA Molecule: Synthetic oligonucleotide
agaacctgucaaucuucucagca

SEQ ID NO: 1884 - DNA, 23 bp, Artificial Sequence
  Description of Artificial Sequence: Synthetic oligonucleotide
  Description of Combined DNA/RNA Molecule: Synthetic oligonucleotide
atgaaccugucaaucuucucagc

SEQ ID NO: 1885 - RNA, 23 nt, Artificial Sequence
  Description of Artificial Sequence: Synthetic oligonucleotide
aaugaaccugucaaucuucucag

SEQ ID NO: 1886 - DNA, 23 bp, Artificial Sequence
  Description of Artificial Sequence: Synthetic oligonucleotide
  Description of Combined DNA/RNA Molecule: Synthetic oligonucleotide
acaugaaccugtcaaucuucuca

SEQ ID NO: 1887 - DNA, 23 bp, Artificial Sequence
  Description of Artificial Sequence: Synthetic oligonucleotide
  Description of Combined DNA/RNA Molecule: Synthetic oligonucleotide
agcatgaaccugucaaucuucuc

SEQ ID NO: 1888 - DNA, 23 bp, Artificial Sequence
  Description of Artificial Sequence: Synthetic oligonucleotide
  Description of Combined DNA/RNA Molecule: Synthetic oligonucleotide
atgcaugaacctgucaaucuucu

SEQ ID NO: 1889 - DNA, 23 bp, Artificial Sequence
  Description of Artificial Sequence: Synthetic oligonucleotide
  Description of Combined DNA/RNA Molecule: Synthetic oligonucleotide
acugcatgaaccugucaaucuuc

SEQ ID NO: 1890 - RNA, 23 nt, Artificial Sequence
  Description of Artificial Sequence: Synthetic oligonucleotide
accugcaugaaccugucaaucuu

SEQ ID NO: 1891 - DNA, 23 bp, Artificial Sequence
  Description of Artificial Sequence: Synthetic oligonucleotide
  Description of Combined DNA/RNA Molecule: Synthetic oligonucleotide
agcctgcaugaaccugucaaucu

SEQ ID NO: 1892 - RNA, 23 nt, Artificial Sequence
  Description of Artificial Sequence: Synthetic oligonucleotide
aagccugcaugaaccugucaauc

SEQ ID NO: 1893 - DNA, 23 bp, Artificial Sequence
  Description of Artificial Sequence: Synthetic oligonucleotide
  Description of Combined DNA/RNA Molecule: Synthetic oligonucleotide
acagcctgcaugaaccugucaau

SEQ ID NO: 1894 - DNA, 23 bp, Artificial Sequence
  Description of Artificial Sequence: Synthetic oligonucleotide
  Description of Combined DNA/RNA Molecule: Synthetic oligonucleotide
aacagccugcatgaaccugucaa

SEQ ID NO: 1895 - RNA, 23 nt, Artificial Sequence
  Description of Artificial Sequence: Synthetic oligonucleotide
acacagccugcaugaaccuguca

SEQ ID NO: 1896 - DNA, 23 bp, Artificial Sequence
  Description of Artificial Sequence: Synthetic oligonucleotide
  Description of Combined DNA/RNA Molecule: Synthetic oligonucleotide
acaucctgucacagccugcauga

SEQ ID NO: 1897 - DNA, 23 bp, Artificial Sequence
  Description of Artificial Sequence: Synthetic oligonucleotide
  Description of Combined DNA/RNA Molecule: Synthetic oligonucleotide
atccauccugucacagccugcau

SEQ ID NO: 1898 - DNA, 23 bp, Artificial Sequence
  Description of Artificial Sequence: Synthetic oligonucleotide
  Description of Combined DNA/RNA Molecule: Synthetic oligonucleotide
atuccatccugtcacagccugca

SEQ ID NO: 1899 - DNA, 23 bp, Artificial Sequence
  Description of Artificial Sequence: Synthetic oligonucleotide
  Description of Combined DNA/RNA Molecule: Synthetic oligonucleotide
atggacguaggtguugaaagcca

SEQ ID NO: 1900 - DNA, 23 bp, Artificial Sequence
  Description of Artificial Sequence: Synthetic oligonucleotide
  Description of Combined DNA/RNA Molecule: Synthetic oligonucleotide
acugtuguccacccagaacuccu

SEQ ID NO: 1901 - RNA, 23 nt, Artificial Sequence
  Description of Artificial Sequence: Synthetic oligonucleotide
aacacugaggugcuguuguccac

SEQ ID NO: 1902 - DNA, 23 bp, Artificial Sequence
  Description of Artificial Sequence: Synthetic oligonucleotide
  Description of Combined DNA/RNA Molecule: Synthetic oligonucleotide
agacactgaggtgcuguugucca

SEQ ID NO: 1903 - RNA, 23 nt, Artificial Sequence
  Description of Artificial Sequence: Synthetic oligonucleotide
aagacacugaggugcuguugucc

SEQ ID NO: 1904 - RNA, 23 nt, Artificial Sequence
  Description of Artificial Sequence: Synthetic oligonucleotide
acagacacugaggugcuguuguc

SEQ ID NO: 1905 - RNA, 23 nt, Artificial Sequence
  Description of Artificial Sequence: Synthetic oligonucleotide
aacagacacugaggugcuguugu

SEQ ID NO: 1906 - DNA, 23 bp, Artificial Sequence
  Description of Artificial Sequence: Synthetic oligonucleotide
  Description of Combined DNA/RNA Molecule: Synthetic oligonucleotide
acuuguccaggtcagaggcauag

SEQ ID NO: 1907 - RNA, 23 nt, Artificial Sequence
  Description of Artificial Sequence: Synthetic oligonucleotide
aaaagugagacccuccaccuugu

SEQ ID NO: 1908 - DNA, 23 bp, Artificial Sequence
  Description of Artificial Sequence: Synthetic oligonucleotide
  Description of Combined DNA/RNA Molecule: Synthetic oligonucleotide
agaaagtgagacccuccaccuug

SEQ ID NO: 1909 - RNA, 23 nt, Artificial Sequence
  Description of Artificial Sequence: Synthetic oligonucleotide
aggaaagugagacccuccaccuu

SEQ ID NO: 1910 - DNA, 23 bp, Artificial Sequence
  Description of Artificial Sequence: Synthetic oligonucleotide
  Description of Combined DNA/RNA Molecule: Synthetic oligonucleotide
atgctggaaagtgagacccucca

SEQ ID NO: 1911 - DNA, 23 bp, Artificial Sequence
  Description of Artificial Sequence: Synthetic oligonucleotide
  Description of Combined DNA/RNA Molecule: Synthetic oligonucleotide
atugcuggaaagugagacccucc

SEQ ID NO: 1912 - DNA, 23 bp, Artificial Sequence
  Description of Artificial Sequence: Synthetic oligonucleotide
  Description of Combined DNA/RNA Molecule: Synthetic oligonucleotide
atuutgcuggaaagugagacccu

SEQ ID NO: 1913 - DNA, 23 bp, Artificial Sequence
  Description of Artificial Sequence: Synthetic oligonucleotide
  Description of Combined DNA/RNA Molecule: Synthetic oligonucleotide
aguutugcuggaaagugagaccc

SEQ ID NO: 1914 - DNA, 23 bp, Artificial Sequence
  Description of Artificial Sequence: Synthetic oligonucleotide
  Description of Combined DNA/RNA Molecule: Synthetic oligonucleotide
aagututgcuggaaagugagacc

SEQ ID NO: 1915 - DNA, 23 bp, Artificial Sequence
  Description of Artificial Sequence: Synthetic oligonucleotide
  Description of Combined DNA/RNA Molecule: Synthetic oligonucleotide
agagtutugcuggaaagugagac

SEQ ID NO: 1916 - DNA, 23 bp, Artificial Sequence
  Description of Artificial Sequence: Synthetic oligonucleotide
  Description of Combined DNA/RNA Molecule: Synthetic oligonucleotide
aggagutuugctggaaagugaga

SEQ ID NO: 1917 - DNA, 23 bp, Artificial Sequence
  Description of Artificial Sequence: Synthetic oligonucleotide
  Description of Combined DNA/RNA Molecule: Synthetic oligonucleotide
agggagtuuugcuggaaagugag

SEQ ID NO: 1918 - RNA, 23 nt, Artificial Sequence
  Description of Artificial Sequence: Synthetic oligonucleotide
aagggaguuuugcuggaaaguga

SEQ ID NO: 1919 - DNA, 23 bp, Artificial Sequence
  Description of Artificial Sequence: Synthetic oligonucleotide
  Description of Combined DNA/RNA Molecule: Synthetic oligonucleotide
agagggaguuutgcuggaaagug

SEQ ID NO: 1920 - DNA, 23 bp, Artificial Sequence
  Description of Artificial Sequence: Synthetic oligonucleotide
  Description of Combined DNA/RNA Molecule: Synthetic oligonucleotide
atgagggaguutugcuggaaagu

SEQ ID NO: 1921 - DNA, 23 bp, Artificial Sequence
  Description of Artificial Sequence: Synthetic oligonucleotide
  Description of Combined DNA/RNA Molecule: Synthetic oligonucleotide
atugagggagutuugcuggaaag

SEQ ID NO: 1922 - DNA, 23 bp, Artificial Sequence
  Description of Artificial Sequence: Synthetic oligonucleotide
  Description of Combined DNA/RNA Molecule: Synthetic oligonucleotide
aguugagggagtuuugcuggaaa

SEQ ID NO: 1923 - DNA, 23 bp, Artificial Sequence
  Description of Artificial Sequence: Synthetic oligonucleotide
  Description of Combined DNA/RNA Molecule: Synthetic oligonucleotide
aagutgagggaguuuugcuggaa

SEQ ID NO: 1924 - DNA, 23 bp, Artificial Sequence
  Description of Artificial Sequence: Synthetic oligonucleotide
  Description of Combined DNA/RNA Molecule: Synthetic oligonucleotide
acagtugagggaguuuugcugga

SEQ ID NO: 1925 - DNA, 23 bp, Artificial Sequence
  Description of Artificial Sequence: Synthetic oligonucleotide
  Description of Combined DNA/RNA Molecule: Synthetic oligonucleotide
accagutgagggaguuuugcugg

SEQ ID NO: 1926 - DNA, 23 bp, Artificial Sequence
  Description of Artificial Sequence: Synthetic oligonucleotide
  Description of Combined DNA/RNA Molecule: Synthetic oligonucleotide
atccagtugagggaguuuugcug

SEQ ID NO: 1927 - RNA, 23 nt, Artificial Sequence
  Description of Artificial Sequence: Synthetic oligonucleotide
aauccaguugagggaguuuugcu

SEQ ID NO: 1928 - RNA, 23 nt, Artificial Sequence
  Description of Artificial Sequence: Synthetic oligonucleotide
acauccaguugagggaguuuugc

SEQ ID NO: 1929 - DNA, 23 bp, Artificial Sequence
  Description of Artificial Sequence: Synthetic oligonucleotide
  Description of Combined DNA/RNA Molecule: Synthetic oligonucleotide
atcatccaguugagggaguuuug

SEQ ID NO: 1930 - DNA, 23 bp, Artificial Sequence
  Description of Artificial Sequence: Synthetic oligonucleotide
  Description of Combined DNA/RNA Molecule: Synthetic oligonucleotide
atucauccagutgagggaguuuu

SEQ ID NO: 1931 - DNA, 23 bp, Artificial Sequence
  Description of Artificial Sequence: Synthetic oligonucleotide
  Description of Combined DNA/RNA Molecule: Synthetic oligonucleotide
acuucatccagtugagggaguuu

SEQ ID NO: 1932 - DNA, 23 bp, Artificial Sequence
  Description of Artificial Sequence: Synthetic oligonucleotide
  Description of Combined DNA/RNA Molecule: Synthetic oligonucleotide
atcutcauccaguugagggaguu

SEQ ID NO: 1933 - DNA, 23 bp, Artificial Sequence
  Description of Artificial Sequence: Synthetic oligonucleotide
  Description of Combined DNA/RNA Molecule: Synthetic oligonucleotide
atuctucauccaguugagggagu

SEQ ID NO: 1934 - DNA, 23 bp, Artificial Sequence
  Description of Artificial Sequence: Synthetic oligonucleotide
  Description of Combined DNA/RNA Molecule: Synthetic oligonucleotide
atuucutcauccaguugagggag

SEQ ID NO: 1935 - DNA, 23 bp, Artificial Sequence
  Description of Artificial Sequence: Synthetic oligonucleotide
  Description of Combined DNA/RNA Molecule: Synthetic oligonucleotide
aguutctucauccaguugaggga

SEQ ID NO: 1936 - DNA, 23 bp, Artificial Sequence
  Description of Artificial Sequence: Synthetic oligonucleotide
  Description of Combined DNA/RNA Molecule: Synthetic oligonucleotide
aagutucuucatccaguugaggg

SEQ ID NO: 1937 - RNA, 23 nt, Artificial Sequence
  Description of Artificial Sequence: Synthetic oligonucleotide
accugcaggucauaagauccuug

SEQ ID NO: 1938 - RNA, 23 nt, Artificial Sequence
  Description of Artificial Sequence: Synthetic oligonucleotide
acagguccugcaggucauaagau

SEQ ID NO: 1939 - DNA, 23 bp, Artificial Sequence
  Description of Artificial Sequence: Synthetic oligonucleotide
  Description of Combined DNA/RNA Molecule: Synthetic oligonucleotide
aauututgcagguucagcucggu

SEQ ID NO: 1940 - DNA, 23 bp, Artificial Sequence
  Description of Artificial Sequence: Synthetic oligonucleotide
  Description of Combined DNA/RNA Molecule: Synthetic oligonucleotide
aaaututugcagguucagcucgg

SEQ ID NO: 1941 - DNA, 23 bp, Artificial Sequence
  Description of Artificial Sequence: Synthetic oligonucleotide
  Description of Combined DNA/RNA Molecule: Synthetic oligonucleotide
acaatutuugcagguucagcucg

SEQ ID NO: 1942 - DNA, 23 bp, Artificial Sequence
  Description of Artificial Sequence: Synthetic oligonucleotide
  Description of Combined DNA/RNA Molecule: Synthetic oligonucleotide
atcaautuuugcagguucagcuc

SEQ ID NO: 1943 - DNA, 23 bp, Artificial Sequence
  Description of Artificial Sequence: Synthetic oligonucleotide
  Description of Combined DNA/RNA Molecule: Synthetic oligonucleotide
acucaatuuuugcagguucagcu

SEQ ID NO: 1944 - DNA, 23 bp, Artificial Sequence
  Description of Artificial Sequence: Synthetic oligonucleotide
  Description of Combined DNA/RNA Molecule: Synthetic oligonucleotide
agcucaauuuutgcagguucagc

SEQ ID NO: 1945 - DNA, 23 bp, Artificial Sequence
  Description of Artificial Sequence: Synthetic oligonucleotide
  Description of Combined DNA/RNA Molecule: Synthetic oligonucleotide
atgctcaauuutugcagguucag

SEQ ID NO: 1946 - DNA, 23 bp, Artificial Sequence
  Description of Artificial Sequence: Synthetic oligonucleotide
  Description of Combined DNA/RNA Molecule: Synthetic oligonucleotide
atugcucaauutuugcagguuca

SEQ ID NO: 1947 - DNA, 23 bp, Artificial Sequence
  Description of Artificial Sequence: Synthetic oligonucleotide
  Description of Combined DNA/RNA Molecule: Synthetic oligonucleotide
aauugctcaautuuugcagguuc

SEQ ID NO: 1948 - DNA, 23 bp, Artificial Sequence
  Description of Artificial Sequence: Synthetic oligonucleotide
  Description of Combined DNA/RNA Molecule: Synthetic oligonucleotide
acautgcucaatuuuugcagguu

SEQ ID NO: 1949 - DNA, 23 bp, Artificial Sequence
  Description of Artificial Sequence: Synthetic oligonucleotide
  Description of Combined DNA/RNA Molecule: Synthetic oligonucleotide
atcatugcucaauuuuugcaggu

SEQ ID NO: 1950 - DNA, 23 bp, Artificial Sequence
  Description of Artificial Sequence: Synthetic oligonucleotide
  Description of Combined DNA/RNA Molecule: Synthetic oligonucleotide
agucautgcucaauuuuugcagg

SEQ ID NO: 1951 - DNA, 23 bp, Artificial Sequence
  Description of Artificial Sequence: Synthetic oligonucleotide
  Description of Combined DNA/RNA Molecule: Synthetic oligonucleotide
aaaaaugcugutcagcaccuccc

SEQ ID NO: 1952 - DNA, 23 bp, Artificial Sequence
  Description of Artificial Sequence: Synthetic oligonucleotide
  Description of Combined DNA/RNA Molecule: Synthetic oligonucleotide
aaaaaatgcugtucagcaccucc

SEQ ID NO: 1953 - RNA, 23 nt, Artificial Sequence
  Description of Artificial Sequence: Synthetic oligonucleotide
aaaaaaaugcuguucagcaccuc

SEQ ID NO: 1954 - DNA, 23 bp, Artificial Sequence
  Description of Artificial Sequence: Synthetic oligonucleotide
  Description of Combined DNA/RNA Molecule: Synthetic oligonucleotide
aaaaaaaaugctguucagcaccu

SEQ ID NO: 1955 - RNA, 23 nt, Artificial Sequence
  Description of Artificial Sequence: Synthetic oligonucleotide
aaaaaaaaaugcuguucagcacc

SEQ ID NO: 1956 - RNA, 23 nt, Artificial Sequence
  Description of Artificial Sequence: Synthetic oligonucleotide
acaaaaaaaaugcuguucagcac

SEQ ID NO: 1957 - DNA, 23 bp, Artificial Sequence
  Description of Artificial Sequence: Synthetic oligonucleotide
  Description of Combined DNA/RNA Molecule: Synthetic oligonucleotide
atcaaaaaaaatgcuguucagca

SEQ ID NO: 1958 - RNA, 23 nt, Artificial Sequence
  Description of Artificial Sequence: Synthetic oligonucleotide
aacucugugggcucucucucauc

SEQ ID NO: 1959 - RNA, 23 nt, Artificial Sequence
  Description of Artificial Sequence: Synthetic oligonucleotide
aagacucugugggcucucucuca

SEQ ID NO: 1960 - DNA, 23 bp, Artificial Sequence
  Description of Artificial Sequence: Synthetic oligonucleotide
  Description of Combined DNA/RNA Molecule: Synthetic oligonucleotide
atagactcugugggcucucucuc

SEQ ID NO: 1961 - DNA, 23 bp, Artificial Sequence
  Description of Artificial Sequence: Synthetic oligonucleotide
  Description of Combined DNA/RNA Molecule: Synthetic oligonucleotide
acaaacaggaatgggcgguucag

SEQ ID NO: 1962 - RNA, 23 nt, Artificial Sequence
  Description of Artificial Sequence: Synthetic oligonucleotide
agcaaacaggaaugggcgguuca

SEQ ID NO: 1963 - RNA, 23 nt, Artificial Sequence
  Description of Artificial Sequence: Synthetic oligonucleotide
aagcaaacaggaaugggcgguuc

SEQ ID NO: 1964 - RNA, 23 nt, Artificial Sequence
  Description of Artificial Sequence: Synthetic oligonucleotide
acagcaaacaggaaugggcgguu

SEQ ID NO: 1965 - RNA, 23 nt, Artificial Sequence
  Description of Artificial Sequence: Synthetic oligonucleotide
aacagcaaacaggaaugggcggu

SEQ ID NO: 1966 - RNA, 23 nt, Artificial Sequence
  Description of Artificial Sequence: Synthetic oligonucleotide
acacagcaaacaggaaugggcgg

SEQ ID NO: 1967 - RNA, 23 nt, Artificial Sequence
  Description of Artificial Sequence: Synthetic oligonucleotide
aacacagcaaacaggaaugggcg

SEQ ID NO: 1968 - DNA, 23 bp, Artificial Sequence
  Description of Artificial Sequence: Synthetic oligonucleotide
  Description of Combined DNA/RNA Molecule: Synthetic oligonucleotide
atacacagcaaacaggaaugggc

SEQ ID NO: 1969 - RNA, 23 nt, Artificial Sequence
  Description of Artificial Sequence: Synthetic oligonucleotide
aauacacagcaaacaggaauggg

SEQ ID NO: 1970 - RNA, 23 nt, Artificial Sequence
  Description of Artificial Sequence: Synthetic oligonucleotide
acauacacagcaaacaggaaugg

SEQ ID NO: 1971 - DNA, 23 bp, Artificial Sequence
  Description of Artificial Sequence: Synthetic oligonucleotide
  Description of Combined DNA/RNA Molecule: Synthetic oligonucleotide
atcatacacagcaaacaggaaug

SEQ ID NO: 1972 - RNA, 23 nt, Artificial Sequence
  Description of Artificial Sequence: Synthetic oligonucleotide
aaucauacacagcaaacaggaau

SEQ ID NO: 1973 - DNA, 23 bp, Artificial Sequence
  Description of Artificial Sequence: Synthetic oligonucleotide
  Description of Combined DNA/RNA Molecule: Synthetic oligonucleotide
agaucatacacagcaaacaggaa

SEQ ID NO: 1974 - DNA, 23 bp, Artificial Sequence
  Description of Artificial Sequence: Synthetic oligonucleotide
  Description of Combined DNA/RNA Molecule: Synthetic oligonucleotide
atgatcauacacagcaaacagga

SEQ ID NO: 1975 - DNA, 23 bp, Artificial Sequence
  Description of Artificial Sequence: Synthetic oligonucleotide
  Description of Combined DNA/RNA Molecule: Synthetic oligonucleotide
atugaucauacacagcaaacagg

SEQ ID NO: 1976 - DNA, 23 bp, Artificial Sequence
  Description of Artificial Sequence: Synthetic oligonucleotide
  Description of Combined DNA/RNA Molecule: Synthetic oligonucleotide
atuugatcauacacagcaaacag

SEQ ID NO: 1977 - DNA, 23 bp, Artificial Sequence
  Description of Artificial Sequence: Synthetic oligonucleotide
  Description of Combined DNA/RNA Molecule: Synthetic oligonucleotide
acuutgaucauacacagcaaaca

SEQ ID NO: 1978 - RNA, 23 nt, Artificial Sequence
  Description of Artificial Sequence: Synthetic oligonucleotide
agaaaaggugggagacugggggu

SEQ ID NO: 1979 - RNA, 23 nt, Artificial Sequence
  Description of Artificial Sequence: Synthetic oligonucleotide
aagaaaaggugggagacuggggg

SEQ ID NO: 1980 - RNA, 23 nt, Artificial Sequence
  Description of Artificial Sequence: Synthetic oligonucleotide
aaagaaaaggugggagacugggg

SEQ ID NO: 1981 - RNA, 23 nt, Artificial Sequence
  Description of Artificial Sequence: Synthetic oligonucleotide
aagaagaaaaggugggagacugg

SEQ ID NO: 1982 - DNA, 23 bp, Artificial Sequence
  Description of Artificial Sequence: Synthetic oligonucleotide
  Description of Combined DNA/RNA Molecule: Synthetic oligonucleotide
atagaagaaaaggugggagacug

SEQ ID NO: 1983 - DNA, 23 bp, Artificial Sequence
  Description of Artificial Sequence: Synthetic oligonucleotide
  Description of Combined DNA/RNA Molecule: Synthetic oligonucleotide
atuagaagaaaaggugggagacu

SEQ ID NO: 1984 - RNA, 23 nt, Artificial Sequence
  Description of Artificial Sequence: Synthetic oligonucleotide
aauuagaagaaaaggugggagac

SEQ ID NO: 1985 - DNA, 23 bp, Artificial Sequence
  Description of Artificial Sequence: Synthetic oligonucleotide
  Description of Combined DNA/RNA Molecule: Synthetic oligonucleotide
acautagaagaaaaggugggaga

SEQ ID NO: 1986 - DNA, 23 bp, Artificial Sequence
  Description of Artificial Sequence: Synthetic oligonucleotide
  Description of Combined DNA/RNA Molecule: Synthetic oligonucleotide
atcatuagaagaaaaggugggag

SEQ ID NO: 1987 - DNA, 23 bp, Artificial Sequence
  Description of Artificial Sequence: Synthetic oligonucleotide
  Description of Combined DNA/RNA Molecule: Synthetic oligonucleotide
acucautagaagaaaagguggga

SEQ ID NO: 1988 - DNA, 23 bp, Artificial Sequence
  Description of Artificial Sequence: Synthetic oligonucleotide
  Description of Combined DNA/RNA Molecule: Synthetic oligonucleotide
aacucatuagaagaaaagguggg

SEQ ID NO: 1989 - DNA, 23 bp, Artificial Sequence
  Description of Artificial Sequence: Synthetic oligonucleotide
  Description of Combined DNA/RNA Molecule: Synthetic oligonucleotide
agactcauuagaagaaaaggugg

SEQ ID NO: 1990 - RNA, 23 nt, Artificial Sequence
  Description of Artificial Sequence: Synthetic oligonucleotide
acuuagaccaaggagaaacggcu

SEQ ID NO: 1991 - DNA, 23 bp, Artificial Sequence
  Description of Artificial Sequence: Synthetic oligonucleotide
  Description of Combined DNA/RNA Molecule: Synthetic oligonucleotide
aacutagaccaaggagaaacggc

SEQ ID NO: 1992 - DNA, 23 bp, Artificial Sequence
  Description of Artificial Sequence: Synthetic oligonucleotide
  Description of Combined DNA/RNA Molecule: Synthetic oligonucleotide
acactuagaccaaggagaaacgg

SEQ ID NO: 1993 - RNA, 23 nt, Artificial Sequence
  Description of Artificial Sequence: Synthetic oligonucleotide
acuaaaauaaacccagcaaacug

SEQ ID NO: 1994 - DNA, 23 bp, Artificial Sequence
  Description of Artificial Sequence: Synthetic oligonucleotide
  Description of Combined DNA/RNA Molecule: Synthetic oligonucleotide
atcuaaaauaaacccagcaaacu

SEQ ID NO: 1995 - DNA, 23 bp, Artificial Sequence
  Description of Artificial Sequence: Synthetic oligonucleotide
  Description of Combined DNA/RNA Molecule: Synthetic oligonucleotide
acuctaaaauaaacccagcaaac

SEQ ID NO: 1996 - DNA, 23 bp, Artificial Sequence
  Description of Artificial Sequence: Synthetic oligonucleotide
  Description of Combined DNA/RNA Molecule: Synthetic oligonucleotide
atcucuaaaauaaacccagcaaa

SEQ ID NO: 1997 - DNA, 23 bp, Artificial Sequence
  Description of Artificial Sequence: Synthetic oligonucleotide
  Description of Combined DNA/RNA Molecule: Synthetic oligonucleotide
atuctctaaaataaacccagcaa

SEQ ID NO: 1998 - RNA, 23 nt, Artificial Sequence
  Description of Artificial Sequence: Synthetic oligonucleotide
aauucucuaaaauaaacccagca

SEQ ID NO: 1999 - DNA, 23 bp, Artificial Sequence
  Description of Artificial Sequence: Synthetic oligonucleotide
  Description of Combined DNA/RNA Molecule: Synthetic oligonucleotide
acautctcuaaaauaaacccagc

SEQ ID NO: 2000 - DNA, 23 bp, Artificial Sequence
  Description of Artificial Sequence: Synthetic oligonucleotide
  Description of Combined DNA/RNA Molecule: Synthetic oligonucleotide
accatucucuaaaauaaacccag

SEQ ID NO: 2001 - DNA, 23 bp, Artificial Sequence
  Description of Artificial Sequence: Synthetic oligonucleotide
  Description of Combined DNA/RNA Molecule: Synthetic oligonucleotide
acccautcucuaaaauaaaccca

SEQ ID NO: 2002 - DNA, 23 bp, Artificial Sequence
  Description of Artificial Sequence: Synthetic oligonucleotide
  Description of Combined DNA/RNA Molecule: Synthetic oligonucleotide
accccatucuctaaaauaaaccc

SEQ ID NO: 2003 - RNA, 23 nt, Artificial Sequence
  Description of Artificial Sequence: Synthetic oligonucleotide
acccccauucucuaaaauaaacc

SEQ ID NO: 2004 - DNA, 23 bp, Artificial Sequence
  Description of Artificial Sequence: Synthetic oligonucleotide
  Description of Combined DNA/RNA Molecule: Synthetic oligonucleotide
atgccuccccacccccauucucu

SEQ ID NO: 2005 - DNA, 23 bp, Artificial Sequence
  Description of Artificial Sequence: Synthetic oligonucleotide
  Description of Combined DNA/RNA Molecule: Synthetic oligonucleotide
atugcctccccacccccauucuc

SEQ ID NO: 2006 - RNA, 23 nt, Artificial Sequence
  Description of Artificial Sequence: Synthetic oligonucleotide
acuugccuccccacccccauucu

SEQ ID NO: 2007 - DNA, 23 bp, Artificial Sequence
  Description of Artificial Sequence: Synthetic oligonucleotide
  Description of Combined DNA/RNA Molecule: Synthetic oligonucleotide
atcutgccuccccacccccauuc

SEQ ID NO: 2008 - DNA, 23 bp, Artificial Sequence
  Description of Artificial Sequence: Synthetic oligonucleotide
  Description of Combined DNA/RNA Molecule: Synthetic oligonucleotide
atuctugccuccccacccccauu

SEQ ID NO: 2009 - DNA, 23 bp, Artificial Sequence
  Description of Artificial Sequence: Synthetic oligonucleotide
  Description of Combined DNA/RNA Molecule: Synthetic oligonucleotide
aguucutgccuccccacccccau

SEQ ID NO: 2010 - DNA, 23 bp, Artificial Sequence
  Description of Artificial Sequence: Synthetic oligonucleotide
  Description of Combined DNA/RNA Molecule: Synthetic oligonucleotide
aacuggtucuugccuccccaccc

SEQ ID NO: 2011 - DNA, 23 bp, Artificial Sequence
  Description of Artificial Sequence: Synthetic oligonucleotide
  Description of Combined DNA/RNA Molecule: Synthetic oligonucleotide
acactgguucutgccuccccacc

SEQ ID NO: 2012 - DNA, 23 bp, Artificial Sequence
  Description of Artificial Sequence: Synthetic oligonucleotide
  Description of Combined DNA/RNA Molecule: Synthetic oligonucleotide
aacacugguuctugccuccccac

SEQ ID NO: 2013 - DNA, 23 bp, Artificial Sequence
  Description of Artificial Sequence: Synthetic oligonucleotide
  Description of Combined DNA/RNA Molecule: Synthetic oligonucleotide
aaacactgguucuugccucccca

SEQ ID NO: 2014 - DNA, 23 bp, Artificial Sequence
  Description of Artificial Sequence: Synthetic oligonucleotide
  Description of Combined DNA/RNA Molecule: Synthetic oligonucleotide
aaaacacuggutcuugccucccc

SEQ ID NO: 2015 - DNA, 23 bp, Artificial Sequence
  Description of Artificial Sequence: Synthetic oligonucleotide
  Description of Combined DNA/RNA Molecule: Synthetic oligonucleotide
ataaacacuggtucuugccuccc

SEQ ID NO: 2016 - RNA, 23 nt, Artificial Sequence
  Description of Artificial Sequence: Synthetic oligonucleotide
acuaaacacugguucuugccucc

SEQ ID NO: 2017 - RNA, 23 nt, Artificial Sequence
  Description of Artificial Sequence: Synthetic oligonucleotide
agcuaaacacugguucuugccuc

SEQ ID NO: 2018 - DNA, 23 bp, Artificial Sequence
  Description of Artificial Sequence: Synthetic oligonucleotide
  Description of Combined DNA/RNA Molecule: Synthetic oligonucleotide
acgctaaacactgguucuugccu

SEQ ID NO: 2019 - RNA, 23 nt, Artificial Sequence
  Description of Artificial Sequence: Synthetic oligonucleotide
agcgcuaaacacugguucuugcc

SEQ ID NO: 2020 - DNA, 23 bp, Artificial Sequence
  Description of Artificial Sequence: Synthetic oligonucleotide
  Description of Combined DNA/RNA Molecule: Synthetic oligonucleotide
acgcgctaaacacugguucuugc

SEQ ID NO: 2021 - RNA, 23 nt, Artificial Sequence
  Description of Artificial Sequence: Synthetic oligonucleotide
accgcgcuaaacacugguucuug

SEQ ID NO: 2022 - RNA, 23 nt, Artificial Sequence
  Description of Artificial Sequence: Synthetic oligonucleotide
acccgcgcuaaacacugguucuu

SEQ ID NO: 2023 - DNA, 23 bp, Artificial Sequence
  Description of Artificial Sequence: Synthetic oligonucleotide
  Description of Combined DNA/RNA Molecule: Synthetic oligonucleotide
atcccgcgcuaaacacugguucu

SEQ ID NO: 2024 - DNA, 23 bp, Artificial Sequence
  Description of Artificial Sequence: Synthetic oligonucleotide
  Description of Combined DNA/RNA Molecule: Synthetic oligonucleotide
atggaatucuutuuggaacagua

SEQ ID NO: 2025 - DNA, 23 bp, Artificial Sequence
  Description of Artificial Sequence: Synthetic oligonucleotide
  Description of Combined DNA/RNA Molecule: Synthetic oligonucleotide
aguuggaauuctuuuuggaacag

SEQ ID NO: 2026 - DNA, 23 bp, Artificial Sequence
  Description of Artificial Sequence: Synthetic oligonucleotide
  Description of Combined DNA/RNA Molecule: Synthetic oligonucleotide
acggtuggaautcuuuuuggaac

SEQ ID NO: 2027 - DNA, 23 bp, Artificial Sequence
  Description of Artificial Sequence: Synthetic oligonucleotide
  Description of Combined DNA/RNA Molecule: Synthetic oligonucleotide
atcggutggaatucuuuuuggaa

SEQ ID NO: 2028 - DNA, 23 bp, Artificial Sequence
  Description of Artificial Sequence: Synthetic oligonucleotide
  Description of Combined DNA/RNA Molecule: Synthetic oligonucleotide
agucggtuggaauucuuuuugga

SEQ ID NO: 2029 - RNA, 23 nt, Artificial Sequence
  Description of Artificial Sequence: Synthetic oligonucleotide
aggucgguuggaauucuuuuugg

SEQ ID NO: 2030 - DNA, 23 bp, Artificial Sequence
  Description of Artificial Sequence: Synthetic oligonucleotide
  Description of Combined DNA/RNA Molecule: Synthetic oligonucleotide
atggtcgguuggaauucuuuuug

SEQ ID NO: 2031 - RNA, 23 nt, Artificial Sequence
  Description of Artificial Sequence: Synthetic oligonucleotide
acuggucgguuggaauucuuuuu

SEQ ID NO: 2032 - DNA, 23 bp, Artificial Sequence
  Description of Artificial Sequence: Synthetic oligonucleotide
  Description of Combined DNA/RNA Molecule: Synthetic oligonucleotide
agcuggtcggutggaauucuuuu

SEQ ID NO: 2033 - DNA, 23 bp, Artificial Sequence
  Description of Artificial Sequence: Synthetic oligonucleotide
  Description of Combined DNA/RNA Molecule: Synthetic oligonucleotide
aagctggucggtuggaauucuuu

SEQ ID NO: 2034 - RNA, 23 nt, Artificial Sequence
  Description of Artificial Sequence: Synthetic oligonucleotide
aaagcuggucgguuggaauucuu

SEQ ID NO: 2035 - DNA, 23 bp, Artificial Sequence
  Description of Artificial Sequence: Synthetic oligonucleotide
  Description of Combined DNA/RNA Molecule: Synthetic oligonucleotide
acaagctggucgguuggaauucu

SEQ ID NO: 2036 - RNA, 23 nt, Artificial Sequence
  Description of Artificial Sequence: Synthetic oligonucleotide
aacaagcuggucgguuggaauuc

SEQ ID NO: 2037 - DNA, 23 bp, Artificial Sequence
  Description of Artificial Sequence: Synthetic oligonucleotide
  Description of Combined DNA/RNA Molecule: Synthetic oligonucleotide
aaacaagcuggtcgguuggaauu

SEQ ID NO: 2038 - RNA, 23 nt, Artificial Sequence
  Description of Artificial Sequence: Synthetic oligonucleotide
aaaacaagcuggucgguuggaau

SEQ ID NO: 2039 - RNA, 23 nt, Artificial Sequence
  Description of Artificial Sequence: Synthetic oligonucleotide
acaaacaagcuggucgguuggaa

SEQ ID NO: 2040 - DNA, 23 bp, Artificial Sequence
  Description of Artificial Sequence: Synthetic oligonucleotide
  Description of Combined DNA/RNA Molecule: Synthetic oligonucleotide
aacaaacaagctggucgguugga

SEQ ID NO: 2041 - RNA, 23 nt, Artificial Sequence
  Description of Artificial Sequence: Synthetic oligonucleotide
acacaaacaagcuggucgguugg

SEQ ID NO: 2042 - DNA, 23 bp, Artificial Sequence
  Description of Artificial Sequence: Synthetic oligonucleotide
  Description of Combined DNA/RNA Molecule: Synthetic oligonucleotide
atcacaaacaagcuggucgguug

SEQ ID NO: 2043 - DNA, 23 bp, Artificial Sequence
  Description of Artificial Sequence: Synthetic oligonucleotide
  Description of Combined DNA/RNA Molecule: Synthetic oligonucleotide
atucacaaacaagcuggucgguu

SEQ ID NO: 2044 - DNA, 23 bp, Artificial Sequence
  Description of Artificial Sequence: Synthetic oligonucleotide
  Description of Combined DNA/RNA Molecule: Synthetic oligonucleotide
atuucacaaacaagcuggucggu

SEQ ID NO: 2045 - DNA, 23 bp, Artificial Sequence
  Description of Artificial Sequence: Synthetic oligonucleotide
  Description of Combined DNA/RNA Molecule: Synthetic oligonucleotide
aguutcacaaacaagcuggucgg

SEQ ID NO: 2046 - DNA, 23 bp, Artificial Sequence
  Description of Artificial Sequence: Synthetic oligonucleotide
  Description of Combined DNA/RNA Molecule: Synthetic oligonucleotide
atgutucacaaacaagcuggucg

SEQ ID NO: 2047 - DNA, 23 bp, Artificial Sequence
  Description of Artificial Sequence: Synthetic oligonucleotide
  Description of Combined DNA/RNA Molecule: Synthetic oligonucleotide
atugtutcacaaacaagcugguc

SEQ ID NO: 2048 - DNA, 23 bp, Artificial Sequence
  Description of Artificial Sequence: Synthetic oligonucleotide
  Description of Combined DNA/RNA Molecule: Synthetic oligonucleotide
atuugutucacaaacaagcuggu

SEQ ID NO: 2049 - DNA, 23 bp, Artificial Sequence
  Description of Artificial Sequence: Synthetic oligonucleotide
  Description of Combined DNA/RNA Molecule: Synthetic oligonucleotide
atuutgtuucacaaacaagcugg

SEQ ID NO: 2050 - DNA, 23 bp, Artificial Sequence
  Description of Artificial Sequence: Synthetic oligonucleotide
  Description of Combined DNA/RNA Molecule: Synthetic oligonucleotide
atuutuguuucacaaacaagcug

SEQ ID NO: 2051 - DNA, 23 bp, Artificial Sequence
  Description of Artificial Sequence: Synthetic oligonucleotide
  Description of Combined DNA/RNA Molecule: Synthetic oligonucleotide
atuututguuucacaaacaagcu

SEQ ID NO: 2052 - DNA, 23 bp, Artificial Sequence
  Description of Artificial Sequence: Synthetic oligonucleotide
  Description of Combined DNA/RNA Molecule: Synthetic oligonucleotide
acuututuguutcacaaacaagc

SEQ ID NO: 2053 - RNA, 23 nt, Artificial Sequence
  Description of Artificial Sequence: Synthetic oligonucleotide
acucaacuugaaaagggaacacu

SEQ ID NO: 2054 - DNA, 23 bp, Artificial Sequence
  Description of Artificial Sequence: Synthetic oligonucleotide
  Description of Combined DNA/RNA Molecule: Synthetic oligonucleotide
atcucaacuugaaaagggaacac

SEQ ID NO: 2055 - DNA, 23 bp, Artificial Sequence
  Description of Artificial Sequence: Synthetic oligonucleotide
  Description of Combined DNA/RNA Molecule: Synthetic oligonucleotide
atuctcaacuugaaaagggaaca

SEQ ID NO: 2056 - DNA, 23 bp, Artificial Sequence
  Description of Artificial Sequence: Synthetic oligonucleotide
  Description of Combined DNA/RNA Molecule: Synthetic oligonucleotide
acaatutuugutcucaacuugaa

SEQ ID NO: 2057 - DNA, 23 bp, Artificial Sequence
  Description of Artificial Sequence: Synthetic oligonucleotide
  Description of Combined DNA/RNA Molecule: Synthetic oligonucleotide
accaautuuugtucucaacuuga

SEQ ID NO: 2058 - DNA, 23 bp, Artificial Sequence
  Description of Artificial Sequence: Synthetic oligonucleotide
  Description of Combined DNA/RNA Molecule: Synthetic oligonucleotide
acccaatuuuuguucucaacuug

SEQ ID NO: 2059 - DNA, 23 bp, Artificial Sequence
  Description of Artificial Sequence: Synthetic oligonucleotide
  Description of Combined DNA/RNA Molecule: Synthetic oligonucleotide
aacccaauuuutguucucaacuu

SEQ ID NO: 2060 - DNA, 23 bp, Artificial Sequence
  Description of Artificial Sequence: Synthetic oligonucleotide
  Description of Combined DNA/RNA Molecule: Synthetic oligonucleotide
aaacccaauuutuguucucaacu

SEQ ID NO: 2061 - DNA, 23 bp, Artificial Sequence
  Description of Artificial Sequence: Synthetic oligonucleotide
  Description of Combined DNA/RNA Molecule: Synthetic oligonucleotide
aaaacccaauutuuguucucaac

SEQ ID NO: 2062 - DNA, 23 bp, Artificial Sequence
  Description of Artificial Sequence: Synthetic oligonucleotide
  Description of Combined DNA/RNA Molecule: Synthetic oligonucleotide
aaaaacccaautuuuguucucaa

SEQ ID NO: 2063 - DNA, 23 bp, Artificial Sequence
  Description of Artificial Sequence: Synthetic oligonucleotide
  Description of Combined DNA/RNA Molecule: Synthetic oligonucleotide
ataaaacccaatuuuuguucuca

SEQ ID NO: 2064 - DNA, 23 bp, Artificial Sequence
  Description of Artificial Sequence: Synthetic oligonucleotide
  Description of Combined DNA/RNA Molecule: Synthetic oligonucleotide
atuaaaacccaauuuuuguucuc

SEQ ID NO: 2065 - RNA, 23 nt, Artificial Sequence
  Description of Artificial Sequence: Synthetic oligonucleotide
agcaaugcaaaaauguauacuuu

SEQ ID NO: 2066 - DNA, 23 bp, Artificial Sequence
  Description of Artificial Sequence: Synthetic oligonucleotide
  Description of Combined DNA/RNA Molecule: Synthetic oligonucleotide
aggcaatgcaaaaauguauacuu

SEQ ID NO: 2067 - RNA, 23 nt, Artificial Sequence
  Description of Artificial Sequence: Synthetic oligonucleotide
aaggcaaugcaaaaauguauacu

SEQ ID NO: 2068 - RNA, 23 nt, Artificial Sequence
  Description of Artificial Sequence: Synthetic oligonucleotide
aaaggcaaugcaaaaauguauac

SEQ ID NO: 2069 - RNA, 23 nt, Artificial Sequence
  Description of Artificial Sequence: Synthetic oligonucleotide
aaccgaaggcaaugcaaaaaugu

SEQ ID NO: 2070 - RNA, 23 nt, Artificial Sequence
  Description of Artificial Sequence: Synthetic oligonucleotide
aaaccgaaggcaaugcaaaaaug

SEQ ID NO: 2071 - RNA, 23 nt, Artificial Sequence
  Description of Artificial Sequence: Synthetic oligonucleotide
aaaaccgaaggcaaugcaaaaau

SEQ ID NO: 2072 - RNA, 23 nt, Artificial Sequence
  Description of Artificial Sequence: Synthetic oligonucleotide
acaaaccgaaggcaaugcaaaaa

SEQ ID NO: 2073 - RNA, 23 nt, Artificial Sequence
  Description of Artificial Sequence: Synthetic oligonucleotide
aacaaaccgaaggcaaugcaaaa

SEQ ID NO: 2074 - DNA, 23 bp, Artificial Sequence
  Description of Artificial Sequence: Synthetic oligonucleotide
  Description of Combined DNA/RNA Molecule: Synthetic oligonucleotide
atacaaaccgaaggcaaugcaaa

SEQ ID NO: 2075 - RNA, 23 nt, Artificial Sequence
  Description of Artificial Sequence: Synthetic oligonucleotide
aauacaaaccgaaggcaaugcaa

SEQ ID NO: 2076 - RNA, 23 nt, Artificial Sequence
  Description of Artificial Sequence: Synthetic oligonucleotide
aaauacaaaccgaaggcaaugca

SEQ ID NO: 2077 - DNA, 23 bp, Artificial Sequence
  Description of Artificial Sequence: Synthetic oligonucleotide
  Description of Combined DNA/RNA Molecule: Synthetic oligonucleotide
aaaatacaaaccgaaggcaaugc

SEQ ID NO: 2078 - DNA, 23 bp, Artificial Sequence
  Description of Artificial Sequence: Synthetic oligonucleotide
  Description of Combined DNA/RNA Molecule: Synthetic oligonucleotide
ataaauacaaaccgaaggcaaug

SEQ ID NO: 2079 - DNA, 23 bp, Artificial Sequence
  Description of Artificial Sequence: Synthetic oligonucleotide
  Description of Combined DNA/RNA Molecule: Synthetic oligonucleotide
acuaaatacaaaccgaaggcaau

SEQ ID NO: 2080 - RNA, 23 nt, Artificial Sequence
  Description of Artificial Sequence: Synthetic oligonucleotide
aacuaaauacaaaccgaaggcaa

SEQ ID NO: 2081 - DNA, 23 bp, Artificial Sequence
  Description of Artificial Sequence: Synthetic oligonucleotide
  Description of Combined DNA/RNA Molecule: Synthetic oligonucleotide
acactaaauacaaaccgaaggca

SEQ ID NO: 2082 - RNA, 23 nt, Artificial Sequence
  Description of Artificial Sequence: Synthetic oligonucleotide
aacacuaaauacaaaccgaaggc

SEQ ID NO: 2083 - DNA, 23 bp, Artificial Sequence
  Description of Artificial Sequence: Synthetic oligonucleotide
  Description of Combined DNA/RNA Molecule: Synthetic oligonucleotide
agacactaaauacaaaccgaagg

SEQ ID NO: 2084 - DNA, 23 bp, Artificial Sequence
  Description of Artificial Sequence: Synthetic oligonucleotide
  Description of Combined DNA/RNA Molecule: Synthetic oligonucleotide
aagacacuaaatacaaaccgaag

SEQ ID NO: 2085 - RNA, 23 nt, Artificial Sequence
  Description of Artificial Sequence: Synthetic oligonucleotide
aaagacacuaaauacaaaccgaa

SEQ ID NO: 2086 - RNA, 23 nt, Artificial Sequence
  Description of Artificial Sequence: Synthetic oligonucleotide
acaagacacuaaauacaaaccga

SEQ ID NO: 2087 - DNA, 23 bp, Artificial Sequence
  Description of Artificial Sequence: Synthetic oligonucleotide
  Description of Combined DNA/RNA Molecule: Synthetic oligonucleotide
atcaagacacuaaauacaaaccg

SEQ ID NO: 2088 - DNA, 23 bp, Artificial Sequence
  Description of Artificial Sequence: Synthetic oligonucleotide
  Description of Combined DNA/RNA Molecule: Synthetic oligonucleotide
atucaagacactaaauacaaacc

SEQ ID NO: 2089 - RNA, 23 nt, Artificial Sequence
  Description of Artificial Sequence: Synthetic oligonucleotide
aauucaagacacuaaauacaaac

SEQ ID NO: 2090 - DNA, 23 bp, Artificial Sequence
  Description of Artificial Sequence: Synthetic oligonucleotide
  Description of Combined DNA/RNA Molecule: Synthetic oligonucleotide
acautcaagacacuaaauacaaa

SEQ ID NO: 2091 - DNA, 23 bp, Artificial Sequence
  Description of Artificial Sequence: Synthetic oligonucleotide
  Description of Combined DNA/RNA Molecule: Synthetic oligonucleotide
aacatucaagacacuaaauacaa

SEQ ID NO: 2092 - DNA, 23 bp, Artificial Sequence
  Description of Artificial Sequence: Synthetic oligonucleotide
  Description of Combined DNA/RNA Molecule: Synthetic oligonucleotide
atacautcaagacacuaaauaca

SEQ ID NO: 2093 - DNA, 23 bp, Artificial Sequence
  Description of Artificial Sequence: Synthetic oligonucleotide
  Description of Combined DNA/RNA Molecule: Synthetic oligonucleotide
atuacatucaagacacuaaauac

SEQ ID NO: 2094 - RNA, 23 nt, Artificial Sequence
  Description of Artificial Sequence: Synthetic oligonucleotide
acuuacauucaagacacuaaaua

SEQ ID NO: 2095 - DNA, 23 bp, Artificial Sequence
  Description of Artificial Sequence: Synthetic oligonucleotide
  Description of Combined DNA/RNA Molecule: Synthetic oligonucleotide
atcutacauucaagacacuaaau

SEQ ID NO: 2096 - DNA, 23 bp, Artificial Sequence
  Description of Artificial Sequence: Synthetic oligonucleotide
  Description of Combined DNA/RNA Molecule: Synthetic oligonucleotide
atuctuacauucaagacacuaaa

SEQ ID NO: 2097 - DNA, 23 bp, Artificial Sequence
  Description of Artificial Sequence: Synthetic oligonucleotide
  Description of Combined DNA/RNA Molecule: Synthetic oligonucleotide
aguucutacautcaagacacuaa

SEQ ID NO: 2098 - DNA, 23 bp, Artificial Sequence
  Description of Artificial Sequence: Synthetic oligonucleotide
  Description of Combined DNA/RNA Molecule: Synthetic oligonucleotide
aaugtucuuacauucaagacacu

SEQ ID NO: 2099 - DNA, 23 bp, Artificial Sequence
  Description of Artificial Sequence: Synthetic oligonucleotide
  Description of Combined DNA/RNA Molecule: Synthetic oligonucleotide
acaugutcuuacauucaagacac

SEQ ID NO: 2100 - DNA, 23 bp, Artificial Sequence
  Description of Artificial Sequence: Synthetic oligonucleotide
  Description of Combined DNA/RNA Molecule: Synthetic oligonucleotide
aggucatguuctuacauucaaga

SEQ ID NO: 2101 - RNA, 23 nt, Artificial Sequence
  Description of Artificial Sequence: Synthetic oligonucleotide
acacggaggucauguucuuacau

SEQ ID NO: 2102 - RNA, 23 nt, Artificial Sequence
  Description of Artificial Sequence: Synthetic oligonucleotide
aacacggaggucauguucuuaca

SEQ ID NO: 2103 - DNA, 23 bp, Artificial Sequence
  Description of Artificial Sequence: Synthetic oligonucleotide
  Description of Combined DNA/RNA Molecule: Synthetic oligonucleotide
atacacggaggtcauguucuuac

SEQ ID NO: 2104 - RNA, 23 nt, Artificial Sequence
  Description of Artificial Sequence: Synthetic oligonucleotide
acuacacggaggucauguucuua

SEQ ID NO: 2105 - RNA, 23 nt, Artificial Sequence
  Description of Artificial Sequence: Synthetic oligonucleotide
aacuacacggaggucauguucuu

SEQ ID NO: 2106 - DNA, 23 bp, Artificial Sequence
  Description of Artificial Sequence: Synthetic oligonucleotide
  Description of Combined DNA/RNA Molecule: Synthetic oligonucleotide
acactacacggaggucauguucu

SEQ ID NO: 2107 - RNA, 23 nt, Artificial Sequence
  Description of Artificial Sequence: Synthetic oligonucleotide
aacacuacacggaggucauguuc

SEQ ID NO: 2108 - DNA, 23 bp, Artificial Sequence
  Description of Artificial Sequence: Synthetic oligonucleotide
  Description of Combined DNA/RNA Molecule: Synthetic oligonucleotide
agacactacacggaggucauguu

SEQ ID NO: 2109 - RNA, 23 nt, Artificial Sequence
  Description of Artificial Sequence: Synthetic oligonucleotide
aagacacuacacggaggucaugu

SEQ ID NO: 2110 - RNA, 23 nt, Artificial Sequence
  Description of Artificial Sequence: Synthetic oligonucleotide
acaucuguggaaaaaacuaaggu

SEQ ID NO: 2111 - DNA, 23 bp, Artificial Sequence
  Description of Artificial Sequence: Synthetic oligonucleotide
  Description of Combined DNA/RNA Molecule: Synthetic oligonucleotide
agcatctguggaaaaaacuaagg

SEQ ID NO: 2112 - RNA, 23 nt, Artificial Sequence
  Description of Artificial Sequence: Synthetic oligonucleotide
aagcaucuguggaaaaaacuaag

SEQ ID NO: 2113 - DNA, 23 bp, Artificial Sequence
  Description of Artificial Sequence: Synthetic oligonucleotide
  Description of Combined DNA/RNA Molecule: Synthetic oligonucleotide
acaagcaucugtggaaaaaacua

SEQ ID NO: 2114 - DNA, 23 bp, Artificial Sequence
  Description of Artificial Sequence: Synthetic oligonucleotide
  Description of Combined DNA/RNA Molecule: Synthetic oligonucleotide
acacaagcauctguggaaaaaac

SEQ ID NO: 2115 - DNA, 23 bp, Artificial Sequence
  Description of Artificial Sequence: Synthetic oligonucleotide
  Description of Combined DNA/RNA Molecule: Synthetic oligonucleotide
atcacaagcaucuguggaaaaaa

SEQ ID NO: 2116 - DNA, 23 bp, Artificial Sequence
  Description of Artificial Sequence: Synthetic oligonucleotide
  Description of Combined DNA/RNA Molecule: Synthetic oligonucleotide
aaucacaagcatcuguggaaaaa

SEQ ID NO: 2117 - RNA, 23 nt, Artificial Sequence
  Description of Artificial Sequence: Synthetic oligonucleotide
aaaucacaagcaucuguggaaaa

SEQ ID NO: 2118 - DNA, 23 bp, Artificial Sequence
  Description of Artificial Sequence: Synthetic oligonucleotide
  Description of Combined DNA/RNA Molecule: Synthetic oligonucleotide
aaaatcacaagcaucuguggaaa

SEQ ID NO: 2119 - RNA, 23 nt, Artificial Sequence
  Description of Artificial Sequence: Synthetic oligonucleotide
aaaaaucacaagcaucuguggaa

SEQ ID NO: 2120 - DNA, 23 bp, Artificial Sequence
  Description of Artificial Sequence: Synthetic oligonucleotide
  Description of Combined DNA/RNA Molecule: Synthetic oligonucleotide
aaaaaatcacaagcaucugugga

SEQ ID NO: 2121 - RNA, 23 nt, Artificial Sequence
  Description of Artificial Sequence: Synthetic oligonucleotide
aauucaaacagaaauucaggugc

SEQ ID NO: 2122 - DNA, 23 bp, Artificial Sequence
  Description of Artificial Sequence: Synthetic oligonucleotide
  Description of Combined DNA/RNA Molecule: Synthetic oligonucleotide
acautcaaacagaaauucaggug

SEQ ID NO: 2123 - DNA, 23 bp, Artificial Sequence
  Description of Artificial Sequence: Synthetic oligonucleotide
  Description of Combined DNA/RNA Molecule: Synthetic oligonucleotide
aaaataaccagcuaugguuccgc

SEQ ID NO: 2124 - RNA, 23 nt, Artificial Sequence
  Description of Artificial Sequence: Synthetic oligonucleotide
agaaauaaccagcuaugguuccg

SEQ ID NO: 2125 - DNA, 23 bp, Artificial Sequence
  Description of Artificial Sequence: Synthetic oligonucleotide
  Description of Combined DNA/RNA Molecule: Synthetic oligonucleotide
aagaaataaccagcuaugguucc

SEQ ID NO: 2126 - RNA, 23 nt, Artificial Sequence
  Description of Artificial Sequence: Synthetic oligonucleotide
agagaaauaaccagcuaugguuc

SEQ ID NO: 2127 - RNA, 23 nt, Artificial Sequence
  Description of Artificial Sequence: Synthetic oligonucleotide
aggagaaauaaccagcuaugguu

SEQ ID NO: 2128 - DNA, 23 bp, Artificial Sequence
  Description of Artificial Sequence: Synthetic oligonucleotide
  Description of Combined DNA/RNA Molecule: Synthetic oligonucleotide
acgutuauuactaacacaaggga

SEQ ID NO: 2129 - DNA, 23 bp, Artificial Sequence
  Description of Artificial Sequence: Synthetic oligonucleotide
  Description of Combined DNA/RNA Molecule: Synthetic oligonucleotide
aacgtutauuacuaacacaaggg

SEQ ID NO: 2130 - DNA, 23 bp, Artificial Sequence
  Description of Artificial Sequence: Synthetic oligonucleotide
  Description of Combined DNA/RNA Molecule: Synthetic oligonucleotide
agacgutuauuacuaacacaagg

SEQ ID NO: 2131 - DNA, 23 bp, Artificial Sequence
  Description of Artificial Sequence: Synthetic oligonucleotide
  Description of Combined DNA/RNA Molecule: Synthetic oligonucleotide
aagacgtuuautacuaacacaag

SEQ ID NO: 2132 - DNA, 23 bp, Artificial Sequence
  Description of Artificial Sequence: Synthetic oligonucleotide
  Description of Combined DNA/RNA Molecule: Synthetic oligonucleotide
aaagacguuuatuacuaacacaa

SEQ ID NO: 2133 - RNA, 23 nt, Artificial Sequence
  Description of Artificial Sequence: Synthetic oligonucleotide
acaagacguuuauuacuaacaca

SEQ ID NO: 2134 - DNA, 23 bp, Artificial Sequence
  Description of Artificial Sequence: Synthetic oligonucleotide
  Description of Combined DNA/RNA Molecule: Synthetic oligonucleotide
agcaagacguutauuacuaacac

SEQ ID NO: 2135 - RNA, 21 nt, Artificial Sequence
  Description of Artificial Sequence: Synthetic oligonucleotide
ccgcucagguucugcuuuuaa

SEQ ID NO: 2136 - DNA, 23 bp, Artificial Sequence
  Description of Artificial Sequence: Synthetic oligonucleotide
  Description of Combined DNA/RNA Molecule: Synthetic oligonucleotide
utaaaagcagaaccugagcggcc

SEQ ID NO: 2137 - DNA, 23 bp, Artificial Sequence
  Description of Artificial Sequence: Synthetic oligonucleotide
  Description of Combined DNA/RNA Molecule: Synthetic oligonucleotide
ataaaaccaactcagcucagagg

SEQ ID NO: 2138 - DNA, 23 bp, Artificial Sequence
  Description of Artificial Sequence: Synthetic oligonucleotide
  Description of Combined DNA/RNA Molecule: Synthetic oligonucleotide
ataaaaccaactcagcucagacc

SEQ ID NO: 2139 - DNA, 23 bp, Artificial Sequence
  Description of Artificial Sequence: Synthetic oligonucleotide
  Description of Combined DNA/RNA Molecule: Synthetic oligonucleotide
agugaaaaaggtguucuaaaauu

SEQ ID NO: 2140 - DNA, 23 bp, Artificial Sequence
  Description of Artificial Sequence: Synthetic oligonucleotide
  Description of Combined DNA/RNA Molecule: Synthetic oligonucleotide
agugaaaaaggtguucuaaaacc

SEQ ID NO: 2141 - RNA, 21 nt, Artificial Sequence
  Description of Artificial Sequence: Synthetic oligonucleotide
aaaagagaaaguguuuuauaa

SEQ ID NO: 2142 - RNA, 21 nt, Artificial Sequence
  Description of Artificial Sequence: Synthetic oligonucleotide
aaagacugauacagaacgaua

SEQ ID NO: 2143 - RNA, 21 nt, Artificial Sequence
  Description of Artificial Sequence: Synthetic oligonucleotide
aaagagaaaguguuuuauaua

SEQ ID NO: 2144 - RNA, 21 nt, Artificial Sequence
  Description of Artificial Sequence: Synthetic oligonucleotide
aacagugcuaauguuauugga

SEQ ID NO: 2145 - RNA, 21 nt, Artificial Sequence
  Description of Artificial Sequence: Synthetic oligonucleotide
aagagaaaguguuuuauauaa

SEQ ID NO: 2146 - RNA, 21 nt, Artificial Sequence
  Description of Artificial Sequence: Synthetic oligonucleotide
aauuggauucgccauuuuaua

SEQ ID NO: 2147 - RNA, 21 nt, Artificial Sequence
  Description of Artificial Sequence: Synthetic oligonucleotide
acagaacaguccuuaauccaa

SEQ ID NO: 2148 - RNA, 21 nt, Artificial Sequence
  Description of Artificial Sequence: Synthetic oligonucleotide
accaggaaagacugauacaga

SEQ ID NO: 2149 - RNA, 21 nt, Artificial Sequence
  Description of Artificial Sequence: Synthetic oligonucleotide
agauuagagaguuuuauuuca

SEQ ID NO: 2150 - RNA, 21 nt, Artificial Sequence
  Description of Artificial Sequence: Synthetic oligonucleotide
auuggauucgccauuuuauua

SEQ ID NO: 2151 - RNA, 21 nt, Artificial Sequence
  Description of Artificial Sequence: Synthetic oligonucleotide
caucaccaugcagauuaugca

SEQ ID NO: 2152 - RNA, 21 nt, Artificial Sequence
  Description of Artificial Sequence: Synthetic oligonucleotide
ccucuuggaauuggauucgca

SEQ ID NO: 2153 - RNA, 21 nt, Artificial Sequence
  Description of Artificial Sequence: Synthetic oligonucleotide
cuacagcacaacaaaugugaa

SEQ ID NO: 2154 - RNA, 21 nt, Artificial Sequence
  Description of Artificial Sequence: Synthetic oligonucleotide
gaaaguguuuuauauacggua

SEQ ID NO: 2155 - RNA, 21 nt, Artificial Sequence
  Description of Artificial Sequence: Synthetic oligonucleotide
gagaaaguguuuuauauacga

SEQ ID NO: 2156 - RNA, 21 nt, Artificial Sequence
  Description of Artificial Sequence: Synthetic oligonucleotide
gauucgccauuuuauuuuuca

SEQ ID NO: 2157 - RNA, 21 nt, Artificial Sequence
  Description of Artificial Sequence: Synthetic oligonucleotide
guccuuaauccagaaaccuga

SEQ ID NO: 2158 - RNA, 21 nt, Artificial Sequence
  Description of Artificial Sequence: Synthetic oligonucleotide
guguuuuauauacgguacuua

SEQ ID NO: 2159 - RNA, 21 nt, Artificial Sequence
  Description of Artificial Sequence: Synthetic oligonucleotide
uagacauugcuauucuguuua

SEQ ID NO: 2160 - RNA, 21 nt, Artificial Sequence
  Description of Artificial Sequence: Synthetic oligonucleotide
cuacagcacaacaaaugugaa

SEQ ID NO: 2161 - RNA, 21 nt, Artificial Sequence
  Description of Artificial Sequence: Synthetic oligonucleotide
aaagacugauacagaacgaua

SEQ ID NO: 2162 - RNA, 21 nt, Artificial Sequence
  Description of Artificial Sequence: Synthetic oligonucleotide
auuggauucgccauuuuauua

SEQ ID NO: 2163 - RNA, 21 nt, Artificial Sequence
  Description of Artificial Sequence: Synthetic oligonucleotide
gauucgccauuuuauuuuuca

SEQ ID NO: 2164 - RNA, 21 nt, Artificial Sequence
  Description of Artificial Sequence: Synthetic oligonucleotide
gagaaaguguuuuauauacga

SEQ ID NO: 2165 - RNA, 21 nt, Artificial Sequence
  Description of Artificial Sequence: Synthetic oligonucleotide
guguuuuauauacgguacuua

SEQ ID NO: 2166 - DNA, 23 bp, Artificial Sequence
  Description of Artificial Sequence: Synthetic oligonucleotide
  Description of Combined DNA/RNA Molecule: Synthetic oligonucleotide
utauaaaacactuucucuuuucu

SEQ ID NO: 2167 - DNA, 23 bp, Artificial Sequence
  Description of Artificial Sequence: Synthetic oligonucleotide
  Description of Combined DNA/RNA Molecule: Synthetic oligonucleotide
uaucgutcuguaucagucuuucc

SEQ ID NO: 2168 - DNA, 23 bp, Artificial Sequence
  Description of Artificial Sequence: Synthetic oligonucleotide
  Description of Combined DNA/RNA Molecule: Synthetic oligonucleotide
uauataaaacacuuucucuuuuc

SEQ ID NO: 2169 - DNA, 23 bp, Artificial Sequence
  Description of Artificial Sequence: Synthetic oligonucleotide
  Description of Combined DNA/RNA Molecule: Synthetic oligonucleotide
uccaauaacautagcacuguugg

SEQ ID NO: 2170 - DNA, 23 bp, Artificial Sequence
  Description of Artificial Sequence: Synthetic oligonucleotide
  Description of Combined DNA/RNA Molecule: Synthetic oligonucleotide
utauauaaaacacuuucucuuuu

SEQ ID NO: 2171 - RNA, 23 nt, Artificial Sequence
  Description of Artificial Sequence: Synthetic oligonucleotide
uauaaaauggcgaauccaauucc

SEQ ID NO: 2172 - DNA, 23 bp, Artificial Sequence
  Description of Artificial Sequence: Synthetic oligonucleotide
  Description of Combined DNA/RNA Molecule: Synthetic oligonucleotide
utggautaaggacuguucugucg

SEQ ID NO: 2173 - DNA, 23 bp, Artificial Sequence
  Description of Artificial Sequence: Synthetic oligonucleotide
  Description of Combined DNA/RNA Molecule: Synthetic oligonucleotide
ucugtatcagucuuuccuggugc

SEQ ID NO: 2174 - DNA, 23 bp, Artificial Sequence
  Description of Artificial Sequence: Synthetic oligonucleotide
  Description of Combined DNA/RNA Molecule: Synthetic oligonucleotide
ugaaauaaaactcucuaaucuuc

SEQ ID NO: 2175 - RNA, 23 nt, Artificial Sequence
  Description of Artificial Sequence: Synthetic oligonucleotide
uaauaaaauggcgaauccaauuc

SEQ ID NO: 2176 - DNA, 23 bp, Artificial Sequence
  Description of Artificial Sequence: Synthetic oligonucleotide
  Description of Combined DNA/RNA Molecule: Synthetic oligonucleotide
ugcataaucugcauggugauguu

SEQ ID NO: 2177 - DNA, 23 bp, Artificial Sequence
  Description of Artificial Sequence: Synthetic oligonucleotide
  Description of Combined DNA/RNA Molecule: Synthetic oligonucleotide
ugcgaatccaatuccaagagggc

SEQ ID NO: 2178 - DNA, 23 bp, Artificial Sequence
  Description of Artificial Sequence: Synthetic oligonucleotide
  Description of Combined DNA/RNA Molecule: Synthetic oligonucleotide
utcacatuugutgugcuguaggg

SEQ ID NO: 2179 - RNA, 23 nt, Artificial Sequence
  Description of Artificial Sequence: Synthetic oligonucleotide
uaccguauauaaaacacuuucuc

SEQ ID NO: 2180 - RNA, 23 nt, Artificial Sequence
  Description of Artificial Sequence: Synthetic oligonucleotide
ucguauauaaaacacuuucucuu

SEQ ID NO: 2181 - RNA, 23 nt, Artificial Sequence
  Description of Artificial Sequence: Synthetic oligonucleotide
ugaaaaauaaaauggcgaauccg

SEQ ID NO: 2182 - DNA, 23 bp, Artificial Sequence
  Description of Artificial Sequence: Synthetic oligonucleotide
  Description of Combined DNA/RNA Molecule: Synthetic oligonucleotide
ucaggutucuggauuaaggacug

SEQ ID NO: 2183 - DNA, 23 bp, Artificial Sequence
  Description of Artificial Sequence: Synthetic oligonucleotide
  Description of Combined DNA/RNA Molecule: Synthetic oligonucleotide
uaagtaccguatauaaaacacuu

SEQ ID NO: 2184 - RNA, 23 nt, Artificial Sequence
  Description of Artificial Sequence: Synthetic oligonucleotide
uaaacagaauagcaaugucuauu

SEQ ID NO: 2185 - RNA, 21 nt, Artificial Sequence
  Description of Artificial Sequence: Synthetic oligonucleotide
acgugacccaagcucgcauga

SEQ ID NO: 2186 - RNA, 21 nt, Artificial Sequence
  Description of Artificial Sequence: Synthetic oligonucleotide
ugacccaagcucgcaugguca

SEQ ID NO: 2187 - RNA, 21 nt, Artificial Sequence
  Description of Artificial Sequence: Synthetic oligonucleotide
acccaagcucgcauggucaga

SEQ ID NO: 2188 - RNA, 21 nt, Artificial Sequence
  Description of Artificial Sequence: Synthetic oligonucleotide
uggcagcaacaaaggauuuga

SEQ ID NO: 2189 - RNA, 21 nt, Artificial Sequence
  Description of Artificial Sequence: Synthetic oligonucleotide
ggcagcaacaaaggauuugaa

SEQ ID NO: 2190 - RNA, 21 nt, Artificial Sequence
  Description of Artificial Sequence: Synthetic oligonucleotide
aacaaaggauuugaaacuuga

SEQ ID NO: 2191 - RNA, 21 nt, Artificial Sequence
  Description of Artificial Sequence: Synthetic oligonucleotide
acaaaggauuugaaacuugga

SEQ ID NO: 2192 - RNA, 21 nt, Artificial Sequence
  Description of Artificial Sequence: Synthetic oligonucleotide
caaaggauuugaaacuuggua

SEQ ID NO: 2193 - RNA, 21 nt, Artificial Sequence
  Description of Artificial Sequence: Synthetic oligonucleotide
aaaggauuugaaacuugguga

SEQ ID NO: 2194 - RNA, 21 nt, Artificial Sequence
  Description of Artificial Sequence: Synthetic oligonucleotide
aaggauuugaaacuuggugua

SEQ ID NO: 2195 - RNA, 21 nt, Artificial Sequence
  Description of Artificial Sequence: Synthetic oligonucleotide
agacgaugucaaccuugugua

SEQ ID NO: 2196 - RNA, 21 nt, Artificial Sequence
  Description of Artificial Sequence: Synthetic oligonucleotide
uagggcuaaccaguucucuua

SEQ ID NO: 2197 - RNA, 21 nt, Artificial Sequence
  Description of Artificial Sequence: Synthetic oligonucleotide
gggcuaaccaguucucuuuga

SEQ ID NO: 2198 - RNA, 21 nt, Artificial Sequence
  Description of Artificial Sequence: Synthetic oligonucleotide
ggcuaaccaguucucuuugua

SEQ ID NO: 2199 - RNA, 21 nt, Artificial Sequence
  Description of Artificial Sequence: Synthetic oligonucleotide
aaccaguucucuuuguaagga

SEQ ID NO: 2200 - RNA, 21 nt, Artificial Sequence
  Description of Artificial Sequence: Synthetic oligonucleotide
cucuuuguaaggacuugugca

SEQ ID NO: 2201 - RNA, 21 nt, Artificial Sequence
  Description of Artificial Sequence: Synthetic oligonucleotide
auacugagggugaaauuaaga

SEQ ID NO: 2202 - RNA, 21 nt, Artificial Sequence
  Description of Artificial Sequence: Synthetic oligonucleotide
acugagggugaaauuaaggga

SEQ ID NO: 2203 - RNA, 21 nt, Artificial Sequence
  Description of Artificial Sequence: Synthetic oligonucleotide
cugagggugaaauuaagggaa

SEQ ID NO: 2204 - RNA, 21 nt, Artificial Sequence
  Description of Artificial Sequence: Synthetic oligonucleotide
uagguguuucugccuuguuga

SEQ ID NO: 2205 - RNA, 21 nt, Artificial Sequence
  Description of Artificial Sequence: Synthetic oligonucleotide
agguguuucugccuuguugaa

SEQ ID NO: 2206 - RNA, 21 nt, Artificial Sequence
  Description of Artificial Sequence: Synthetic oligonucleotide
agcugaacauauacauagaua

SEQ ID NO: 2207 - RNA, 21 nt, Artificial Sequence
  Description of Artificial Sequence: Synthetic oligonucleotide
gcugaacauauacauagauga

SEQ ID NO: 2208 - RNA, 21 nt, Artificial Sequence
  Description of Artificial Sequence: Synthetic oligonucleotide
gaacauauacauagauguuga

SEQ ID NO: 2209 - RNA, 21 nt, Artificial Sequence
  Description of Artificial Sequence: Synthetic oligonucleotide
gaguuguaguuggauuuguca

SEQ ID NO: 2210 - RNA, 21 nt, Artificial Sequence
  Description of Artificial Sequence: Synthetic oligonucleotide
aguuguaguuggauuugucua

SEQ ID NO: 2211 - RNA, 21 nt, Artificial Sequence
  Description of Artificial Sequence: Synthetic oligonucleotide
guuguaguuggauuugucuga

SEQ ID NO: 2212 - RNA, 21 nt, Artificial Sequence
  Description of Artificial Sequence: Synthetic oligonucleotide
aguuggauuugucuguuuaua

SEQ ID NO: 2213 - RNA, 21 nt, Artificial Sequence
  Description of Artificial Sequence: Synthetic oligonucleotide
uuggauuugucuguuuaugca

SEQ ID NO: 2214 - RNA, 21 nt, Artificial Sequence
  Description of Artificial Sequence: Synthetic oligonucleotide
uugucuguuuaugcuuggaua

SEQ ID NO: 2215 - RNA, 21 nt, Artificial Sequence
  Description of Artificial Sequence: Synthetic oligonucleotide
ccagagugacuaugauaguga

SEQ ID NO: 2216 - RNA, 21 nt, Artificial Sequence
  Description of Artificial Sequence: Synthetic oligonucleotide
cagagugacuaugauagugaa

SEQ ID NO: 2217 - RNA, 21 nt, Artificial Sequence
  Description of Artificial Sequence: Synthetic oligonucleotide
cgcauguaucuugaaaugcua

SEQ ID NO: 2218 - RNA, 21 nt, Artificial Sequence
  Description of Artificial Sequence: Synthetic oligonucleotide
cauguaucuugaaaugcuuga

SEQ ID NO: 2219 - RNA, 21 nt, Artificial Sequence
  Description of Artificial Sequence: Synthetic oligonucleotide
gguuuggguacaguuaaagga

SEQ ID NO: 2220 - RNA, 21 nt, Artificial Sequence
  Description of Artificial Sequence: Synthetic oligonucleotide
uuuggguacaguuaaaggcaa

SEQ ID NO: 2221 - RNA, 21 nt, Artificial Sequence
  Description of Artificial Sequence: Synthetic oligonucleotide
cauuacugccaacaguuucga

SEQ ID NO: 2222 - RNA, 21 nt, Artificial Sequence
  Description of Artificial Sequence: Synthetic oligonucleotide
uacugccaacaguuucggcua

SEQ ID NO: 2223 - RNA, 21 nt, Artificial Sequence
  Description of Artificial Sequence: Synthetic oligonucleotide
guuccucuuccugaaguucua

SEQ ID NO: 2224 - RNA, 21 nt, Artificial Sequence
  Description of Artificial Sequence: Synthetic oligonucleotide
uuccucuuccugaaguucuua

SEQ ID NO: 2225 - RNA, 21 nt, Artificial Sequence
  Description of Artificial Sequence: Synthetic oligonucleotide
uccucuuccugaaguucuuga

SEQ ID NO: 2226 - RNA, 21 nt, Artificial Sequence
  Description of Artificial Sequence: Synthetic oligonucleotide
ucuuccugaaguucuugugca

SEQ ID NO: 2227 - RNA, 21 nt, Artificial Sequence
  Description of Artificial Sequence: Synthetic oligonucleotide
cacgcuggcuugugaucuuaa

SEQ ID NO: 2228 - RNA, 21 nt, Artificial Sequence
  Description of Artificial Sequence: Synthetic oligonucleotide
ugggcuagauaggauauacua

SEQ ID NO: 2229 - RNA, 21 nt, Artificial Sequence
  Description of Artificial Sequence: Synthetic oligonucleotide
uagauaggauauacuguauga

SEQ ID NO: 2230 - RNA, 21 nt, Artificial Sequence
  Description of Artificial Sequence: Synthetic oligonucleotide
acuuuaucaauaguuccauua

SEQ ID NO: 2231 - RNA, 21 nt, Artificial Sequence
  Description of Artificial Sequence: Synthetic oligonucleotide
auaguuccauuuaaauugaca

SEQ ID NO: 2232 - RNA, 21 nt, Artificial Sequence
  Description of Artificial Sequence: Synthetic oligonucleotide
agacuguauccuguuugcuaa

SEQ ID NO: 2233 - RNA, 21 nt, Artificial Sequence
  Description of Artificial Sequence: Synthetic oligonucleotide
cuguauccuguuugcuauuga

SEQ ID NO: 2234 - RNA, 21 nt, Artificial Sequence
  Description of Artificial Sequence: Synthetic oligonucleotide
auggacaucugguugcuuuga

SEQ ID NO: 2235 - RNA, 21 nt, Artificial Sequence
  Description of Artificial Sequence: Synthetic oligonucleotide
cuucugauuucucuucagcua

SEQ ID NO: 2236 - RNA, 21 nt, Artificial Sequence
  Description of Artificial Sequence: Synthetic oligonucleotide
ugauuucucuucagcuuugaa

SEQ ID NO: 2237 - RNA, 21 nt, Artificial Sequence
  Description of Artificial Sequence: Synthetic oligonucleotide
gauuucucuucagcuuugaaa

SEQ ID NO: 2238 - RNA, 21 nt, Artificial Sequence
  Description of Artificial Sequence: Synthetic oligonucleotide
cuugcaagucccaugauuuca

SEQ ID NO: 2239 - RNA, 21 nt, Artificial Sequence
  Description of Artificial Sequence: Synthetic oligonucleotide
ugcaagucccaugauuucuua

SEQ ID NO: 2240 - RNA, 21 nt, Artificial Sequence
  Description of Artificial Sequence: Synthetic oligonucleotide
caagucccaugauuucuucga

SEQ ID NO: 2241 - RNA, 21 nt, Artificial Sequence
  Description of Artificial Sequence: Synthetic oligonucleotide
agucccaugauuucuucggua

SEQ ID NO: 2242 - RNA, 21 nt, Artificial Sequence
  Description of Artificial Sequence: Synthetic oligonucleotide
gucccaugauuucuucgguaa

SEQ ID NO: 2243 - RNA, 21 nt, Artificial Sequence
  Description of Artificial Sequence: Synthetic oligonucleotide
cccaugauuucuucgguaaua

SEQ ID NO: 2244 - RNA, 21 nt, Artificial Sequence
  Description of Artificial Sequence: Synthetic oligonucleotide
ccaugauuucuucgguaauua

SEQ ID NO: 2245 - RNA, 21 nt, Artificial Sequence
  Description of Artificial Sequence: Synthetic oligonucleotide
agggacaugaaaucaucuuaa

SEQ ID NO: 2246 - RNA, 21 nt, Artificial Sequence
  Description of Artificial Sequence: Synthetic oligonucleotide
ggacaugaaaucaucuuagca

SEQ ID NO: 2247 - RNA, 21 nt, Artificial Sequence
  Description of Artificial Sequence: Synthetic oligonucleotide
gacaugaaaucaucuuagcua

SEQ ID NO: 2248 - RNA, 21 nt, Artificial Sequence
  Description of Artificial Sequence: Synthetic oligonucleotide
augaaaucaucuuagcuuaga

SEQ ID NO: 2249 - RNA, 21 nt, Artificial Sequence
  Description of Artificial Sequence: Synthetic oligonucleotide
gaaaucaucuuagcuuagcua

SEQ ID NO: 2250 - RNA, 21 nt, Artificial Sequence
  Description of Artificial Sequence: Synthetic oligonucleotide
gucuauauaguguauugugua

SEQ ID NO: 2251 - RNA, 21 nt, Artificial Sequence
  Description of Artificial Sequence: Synthetic oligonucleotide
uauauaguguauuguguguua

SEQ ID NO: 2252 - RNA, 21 nt, Artificial Sequence
  Description of Artificial Sequence: Synthetic oligonucleotide
auauaguguauuguguguuua

SEQ ID NO: 2253 - RNA, 21 nt, Artificial Sequence
  Description of Artificial Sequence: Synthetic oligonucleotide
caaaugauuuacacugacuga

SEQ ID NO: 2254 - RNA, 21 nt, Artificial Sequence
  Description of Artificial Sequence: Synthetic oligonucleotide
aaugauuuacacugacuguua

SEQ ID NO: 2255 - RNA, 21 nt, Artificial Sequence
  Description of Artificial Sequence: Synthetic oligonucleotide
gaaauaaaguuauuacucuga

SEQ ID NO: 2256 - RNA, 21 nt, Artificial Sequence
  Description of Artificial Sequence: Synthetic oligonucleotide
gcucgcauggucaguaaaaga

SEQ ID NO: 2257 - RNA, 21 nt, Artificial Sequence
  Description of Artificial Sequence: Synthetic oligonucleotide
cucgcauggucaguaaaagca

SEQ ID NO: 2258 - RNA, 21 nt, Artificial Sequence
  Description of Artificial Sequence: Synthetic oligonucleotide
gucaguaaaagcaaagacgga

SEQ ID NO: 2259 - RNA, 21 nt, Artificial Sequence
  Description of Artificial Sequence: Synthetic oligonucleotide
ucaguaaaagcaaagacggga

SEQ ID NO: 2260 - RNA, 21 nt, Artificial Sequence
  Description of Artificial Sequence: Synthetic oligonucleotide
caguaaaagcaaagacgggaa

SEQ ID NO: 2261 - RNA, 21 nt, Artificial Sequence
  Description of Artificial Sequence: Synthetic oligonucleotide
auaauaucaaacacgucccga

SEQ ID NO: 2262 - RNA, 21 nt, Artificial Sequence
  Description of Artificial Sequence: Synthetic oligonucleotide
aauaucaaacacgucccggga

SEQ ID NO: 2263 - RNA, 21 nt, Artificial Sequence
  Description of Artificial Sequence: Synthetic oligonucleotide
uaucaaacacgucccgggaga

SEQ ID NO: 2264 - RNA, 21 nt, Artificial Sequence
  Description of Artificial Sequence: Synthetic oligonucleotide
aucaaacacgucccgggagga

SEQ ID NO: 2265 - RNA, 21 nt, Artificial Sequence
  Description of Artificial Sequence: Synthetic oligonucleotide
cacgucccgggaggcggcaga

SEQ ID NO: 2266 - RNA, 21 nt, Artificial Sequence
  Description of Artificial Sequence: Synthetic oligonucleotide
ucccgggaggcggcaguguga

SEQ ID NO: 2267 - RNA, 21 nt, Artificial Sequence
  Description of Artificial Sequence: Synthetic oligonucleotide
gcaaauagucuacaaaccaga

SEQ ID NO: 2268 - RNA, 21 nt, Artificial Sequence
  Description of Artificial Sequence: Synthetic oligonucleotide
aauagucuacaaaccaguuga

SEQ ID NO: 2269 - RNA, 21 nt, Artificial Sequence
  Description of Artificial Sequence: Synthetic oligonucleotide
uagucuacaaaccaguugaca

SEQ ID NO: 2270 - RNA, 21 nt, Artificial Sequence
  Description of Artificial Sequence: Synthetic oligonucleotide
caacauccaucauaaaccaga

SEQ ID NO: 2271 - RNA, 21 nt, Artificial Sequence
  Description of Artificial Sequence: Synthetic oligonucleotide
auccaucauaaaccaggagga

SEQ ID NO: 2272 - RNA, 21 nt, Artificial Sequence
  Description of Artificial Sequence: Synthetic oligonucleotide
ccaucauaaaccaggagguga

SEQ ID NO: 2273 - RNA, 21 nt, Artificial Sequence
  Description of Artificial Sequence: Synthetic oligonucleotide
caucauaaaccaggaggugga

SEQ ID NO: 2274 - RNA, 21 nt, Artificial Sequence
  Description of Artificial Sequence: Synthetic oligonucleotide
accaggagguggccaggugga

SEQ ID NO: 2275 - RNA, 21 nt, Artificial Sequence
  Description of Artificial Sequence: Synthetic oligonucleotide
agauaauuaauaagaagcuga

SEQ ID NO: 2276 - RNA, 21 nt, Artificial Sequence
  Description of Artificial Sequence: Synthetic oligonucleotide
uuaauaagaagcuggaucuua

SEQ ID NO: 2277 - RNA, 21 nt, Artificial Sequence
  Description of Artificial Sequence: Synthetic oligonucleotide
auaagaagcuggaucuuagca

SEQ ID NO: 2278 - RNA, 21 nt, Artificial Sequence
  Description of Artificial Sequence: Synthetic oligonucleotide
agcuggaucuuagcaacguca

SEQ ID NO: 2279 - RNA, 21 nt, Artificial Sequence
  Description of Artificial Sequence: Synthetic oligonucleotide
gcuggaucuuagcaacgucca

SEQ ID NO: 2280 - RNA, 21 nt, Artificial Sequence
  Description of Artificial Sequence: Synthetic oligonucleotide
uggaucuuagcaacguccaga

SEQ ID NO: 2281 - RNA, 21 nt, Artificial Sequence
  Description of Artificial Sequence: Synthetic oligonucleotide
gcaacguccaguccaagugua

SEQ ID NO: 2282 - RNA, 21 nt, Artificial Sequence
  Description of Artificial Sequence: Synthetic oligonucleotide
caacguccaguccaaguguga

SEQ ID NO: 2283 - RNA, 21 nt, Artificial Sequence
  Description of Artificial Sequence: Synthetic oligonucleotide
aacguccaguccaagugugga

SEQ ID NO: 2284 - RNA, 21 nt, Artificial Sequence
  Description of Artificial Sequence: Synthetic oligonucleotide
guccaaguguggcucaaagga

SEQ ID NO: 2285 - RNA, 21 nt, Artificial Sequence
  Description of Artificial Sequence: Synthetic oligonucleotide
uccaaguguggcucaaaggaa

SEQ ID NO: 2286 - RNA, 21 nt, Artificial Sequence
  Description of Artificial Sequence: Synthetic oligonucleotide
ccaaguguggcucaaaggaua

SEQ ID NO: 2287 - RNA, 21 nt, Artificial Sequence
  Description of Artificial Sequence: Synthetic oligonucleotide
guggcucaaaggauaauauca

SEQ ID NO: 2288 - RNA, 21 nt, Artificial Sequence
  Description of Artificial Sequence: Synthetic oligonucleotide
ggcucaaaggauaauaucaaa

SEQ ID NO: 2289 - RNA, 21 nt, Artificial Sequence
  Description of Artificial Sequence: Synthetic oligonucleotide
ggauaauaucaaacacgucca

SEQ ID NO: 2290 - DNA, 23 bp, Artificial Sequence
  Description of Artificial Sequence: Synthetic oligonucleotide
  Description of Combined DNA/RNA Molecule: Synthetic oligonucleotide
ucaugcgagcutgggucacguga

SEQ ID NO: 2291 - DNA, 23 bp, Artificial Sequence
  Description of Artificial Sequence: Synthetic oligonucleotide
  Description of Combined DNA/RNA Molecule: Synthetic oligonucleotide
ugaccatgcgagcuugggucacg

SEQ ID NO: 2292 - RNA, 23 nt, Artificial Sequence
  Description of Artificial Sequence: Synthetic oligonucleotide
ucugaccaugcgagcuuggguca

SEQ ID NO: 2293 - RNA, 23 nt, Artificial Sequence
  Description of Artificial Sequence: Synthetic oligonucleotide
ucaaauccuuuguugcugccacu

SEQ ID NO: 2294 - DNA, 23 bp, Artificial Sequence
  Description of Artificial Sequence: Synthetic oligonucleotide
  Description of Combined DNA/RNA Molecule: Synthetic oligonucleotide
utcaaatccuutguugcugccac

SEQ ID NO: 2295 - DNA, 23 bp, Artificial Sequence
  Description of Artificial Sequence: Synthetic oligonucleotide
  Description of Combined DNA/RNA Molecule: Synthetic oligonucleotide
ucaagutucaaauccuuuguugc

SEQ ID NO: 2296 - DNA, 23 bp, Artificial Sequence
  Description of Artificial Sequence: Synthetic oligonucleotide
  Description of Combined DNA/RNA Molecule: Synthetic oligonucleotide
uccaagtuucaaauccuuuguug

SEQ ID NO: 2297 - RNA, 23 nt, Artificial Sequence
  Description of Artificial Sequence: Synthetic oligonucleotide
uaccaaguuucaaauccuuuguu

SEQ ID NO: 2298 - RNA, 23 nt, Artificial Sequence
  Description of Artificial Sequence: Synthetic oligonucleotide
ucaccaaguuucaaauccuuugu

SEQ ID NO: 2299 - DNA, 23 bp, Artificial Sequence
  Description of Artificial Sequence: Synthetic oligonucleotide
  Description of Combined DNA/RNA Molecule: Synthetic oligonucleotide
uacaccaaguutcaaauccuuug

SEQ ID NO: 2300 - RNA, 23 nt, Artificial Sequence
  Description of Artificial Sequence: Synthetic oligonucleotide
uacacaagguugacaucgucugc

SEQ ID NO: 2301 - RNA, 23 nt, Artificial Sequence
  Description of Artificial Sequence: Synthetic oligonucleotide
uaagagaacugguuagcccuaaa

SEQ ID NO: 2302 - DNA, 23 bp, Artificial Sequence
  Description of Artificial Sequence: Synthetic oligonucleotide
  Description of Combined DNA/RNA Molecule: Synthetic oligonucleotide
ucaaagagaactgguuagcccua

SEQ ID NO: 2303 - RNA, 23 nt, Artificial Sequence
  Description of Artificial Sequence: Synthetic oligonucleotide
uacaaagagaacugguuagcccu

SEQ ID NO: 2304 - DNA, 23 bp, Artificial Sequence
  Description of Artificial Sequence: Synthetic oligonucleotide
  Description of Combined DNA/RNA Molecule: Synthetic oligonucleotide
uccutacaaagagaacugguuag

SEQ ID NO: 2305 - DNA, 23 bp, Artificial Sequence
  Description of Artificial Sequence: Synthetic oligonucleotide
  Description of Combined DNA/RNA Molecule: Synthetic oligonucleotide
ugcacaagucctuacaaagagaa

SEQ ID NO: 2306 - DNA, 23 bp, Artificial Sequence
  Description of Artificial Sequence: Synthetic oligonucleotide
  Description of Combined DNA/RNA Molecule: Synthetic oligonucleotide
ucuuaatuucacccucaguaugg

SEQ ID NO: 2307 - DNA, 23 bp, Artificial Sequence
  Description of Artificial Sequence: Synthetic oligonucleotide
  Description of Combined DNA/RNA Molecule: Synthetic oligonucleotide
uccctuaauuucacccucaguau

SEQ ID NO: 2308 - DNA, 23 bp, Artificial Sequence
  Description of Artificial Sequence: Synthetic oligonucleotide
  Description of Combined DNA/RNA Molecule: Synthetic oligonucleotide
utcccutaauutcacccucagua

SEQ ID NO: 2309 - RNA, 23 nt, Artificial Sequence
  Description of Artificial Sequence: Synthetic oligonucleotide
ucaacaaggcagaaacaccuagg

SEQ ID NO: 2310 - DNA, 23 bp, Artificial Sequence
  Description of Artificial Sequence: Synthetic oligonucleotide
  Description of Combined DNA/RNA Molecule: Synthetic oligonucleotide
utcaacaaggcagaaacaccuag

SEQ ID NO: 2311 - DNA, 23 bp, Artificial Sequence
  Description of Artificial Sequence: Synthetic oligonucleotide
  Description of Combined DNA/RNA Molecule: Synthetic oligonucleotide
uauctatguauauguucagcugc

SEQ ID NO: 2312 - DNA, 23 bp, Artificial Sequence
  Description of Artificial Sequence: Synthetic oligonucleotide
  Description of Combined DNA/RNA Molecule: Synthetic oligonucleotide
ucaucuauguatauguucagcug

SEQ ID NO: 2313 - DNA, 23 bp, Artificial Sequence
  Description of Artificial Sequence: Synthetic oligonucleotide
  Description of Combined DNA/RNA Molecule: Synthetic oligonucleotide
ucaacatcuauguauauguucag

SEQ ID NO: 2314 - RNA, 23 nt, Artificial Sequence
  Description of Artificial Sequence: Synthetic oligonucleotide
ugacaaauccaacuacaacucaa

SEQ ID NO: 2315 - RNA, 23 nt, Artificial Sequence
  Description of Artificial Sequence: Synthetic oligonucleotide
uagacaaauccaacuacaacuca

SEQ ID NO: 2316 - RNA, 23 nt, Artificial Sequence
  Description of Artificial Sequence: Synthetic oligonucleotide
ucagacaaauccaacuacaacuc

SEQ ID NO: 2317 - RNA, 23 nt, Artificial Sequence
  Description of Artificial Sequence: Synthetic oligonucleotide
uauaaacagacaaauccaacuac

SEQ ID NO: 2318 - DNA, 23 bp, Artificial Sequence
  Description of Artificial Sequence: Synthetic oligonucleotide
  Description of Combined DNA/RNA Molecule: Synthetic oligonucleotide
ugcataaacagacaaauccaacu

SEQ ID NO: 2319 - RNA, 23 nt, Artificial Sequence
  Description of Artificial Sequence: Synthetic oligonucleotide
uauccaagcauaaacagacaaau

SEQ ID NO: 2320 - DNA, 23 bp, Artificial Sequence
  Description of Artificial Sequence: Synthetic oligonucleotide
  Description of Combined DNA/RNA Molecule: Synthetic oligonucleotide
ucactatcauagucacucuggug

SEQ ID NO: 2321 - DNA, 23 bp, Artificial Sequence
  Description of Artificial Sequence: Synthetic oligonucleotide
  Description of Combined DNA/RNA Molecule: Synthetic oligonucleotide
utcacuaucauagucacucuggu

SEQ ID NO: 2322 - DNA, 23 bp, Artificial Sequence
  Description of Artificial Sequence: Synthetic oligonucleotide
  Description of Combined DNA/RNA Molecule: Synthetic oligonucleotide
uagcautucaagauacaugcguc

SEQ ID NO: 2323 - DNA, 23 bp, Artificial Sequence
  Description of Artificial Sequence: Synthetic oligonucleotide
  Description of Combined DNA/RNA Molecule: Synthetic oligonucleotide
ucuctutacaagcauuucaagau

SEQ ID NO: 2324 - DNA, 23 bp, Artificial Sequence
  Description of Artificial Sequence: Synthetic oligonucleotide
  Description of Combined DNA/RNA Molecule: Synthetic oligonucleotide
uccucutuacaagcauuucaaga

SEQ ID NO: 2325 - DNA, 23 bp, Artificial Sequence
  Description of Artificial Sequence: Synthetic oligonucleotide
  Description of Combined DNA/RNA Molecule: Synthetic oligonucleotide
uagaaaccucutuacaagcauuu

SEQ ID NO: 2326 - DNA, 23 bp, Artificial Sequence
  Description of Artificial Sequence: Synthetic oligonucleotide
  Description of Combined DNA/RNA Molecule: Synthetic oligonucleotide
utagaaaccuctuuacaagcauu

SEQ ID NO: 2327 - DNA, 23 bp, Artificial Sequence
  Description of Artificial Sequence: Synthetic oligonucleotide
  Description of Combined DNA/RNA Molecule: Synthetic oligonucleotide
uccutuaacugtacccaaaccag

SEQ ID NO: 2328 - DNA, 23 bp, Artificial Sequence
  Description of Artificial Sequence: Synthetic oligonucleotide
  Description of Combined DNA/RNA Molecule: Synthetic oligonucleotide
utcucuaaccaccaccaaaucua

SEQ ID NO: 2329 - RNA, 23 nt, Artificial Sequence
  Description of Artificial Sequence: Synthetic oligonucleotide
ucgaaacuguuggcaguaaugag

SEQ ID NO: 2330 - RNA, 23 nt, Artificial Sequence
  Description of Artificial Sequence: Synthetic oligonucleotide
uagccgaaacuguuggcaguaau

SEQ ID NO: 2331 - RNA, 23 nt, Artificial Sequence
  Description of Artificial Sequence: Synthetic oligonucleotide
uaagaacuucaggaagaggaacc

SEQ ID NO: 2332 - RNA, 23 nt, Artificial Sequence
  Description of Artificial Sequence: Synthetic oligonucleotide
ucaagaacuucaggaagaggaac

SEQ ID NO: 2333 - RNA, 23 nt, Artificial Sequence
  Description of Artificial Sequence: Synthetic oligonucleotide
uacaagaacuucaggaagaggaa

SEQ ID NO: 2334 - DNA, 23 bp, Artificial Sequence
  Description of Artificial Sequence: Synthetic oligonucleotide
  Description of Combined DNA/RNA Molecule: Synthetic oligonucleotide
ucacaagaacutcaggaagagga

SEQ ID NO: 2335 - DNA, 23 bp, Artificial Sequence
  Description of Artificial Sequence: Synthetic oligonucleotide
  Description of Combined DNA/RNA Molecule: Synthetic oligonucleotide
ugcacaagaactucaggaagagg

SEQ ID NO: 2336 - RNA, 23 nt, Artificial Sequence
  Description of Artificial Sequence: Synthetic oligonucleotide
ucuaaaccaugaucuuaggcugg

SEQ ID NO: 2337 - RNA, 23 nt, Artificial Sequence
  Description of Artificial Sequence: Synthetic oligonucleotide
uccuaaaccaugaucuuaggcug

SEQ ID NO: 2338 - DNA, 23 bp, Artificial Sequence
  Description of Artificial Sequence: Synthetic oligonucleotide
  Description of Combined DNA/RNA Molecule: Synthetic oligonucleotide
uaautuaucugccagcacugauc

SEQ ID NO: 2339 - RNA, 23 nt, Artificial Sequence
  Description of Artificial Sequence: Synthetic oligonucleotide
uaguauauccuaucuagcccacc

SEQ ID NO: 2340 - DNA, 23 bp, Artificial Sequence
  Description of Artificial Sequence: Synthetic oligonucleotide
  Description of Combined DNA/RNA Molecule: Synthetic oligonucleotide
ucagtataucctaucuagcccac

SEQ ID NO: 2341 - RNA, 23 nt, Artificial Sequence
  Description of Artificial Sequence: Synthetic oligonucleotide
ucauacaguauauccuaucuagc

SEQ ID NO: 2342 - DNA, 23 bp, Artificial Sequence
  Description of Artificial Sequence: Synthetic oligonucleotide
  Description of Combined DNA/RNA Molecule: Synthetic oligonucleotide
ugaacuauugataaagugaguca

SEQ ID NO: 2343 - DNA, 23 bp, Artificial Sequence
  Description of Artificial Sequence: Synthetic oligonucleotide
  Description of Combined DNA/RNA Molecule: Synthetic oligonucleotide
ugucaatuuaaauggaacuauug

SEQ ID NO: 2344 - RNA, 23 nt, Artificial Sequence
  Description of Artificial Sequence: Synthetic oligonucleotide
ucaaacaggauacagucucacca

SEQ ID NO: 2345 - DNA, 23 bp, Artificial Sequence
  Description of Artificial Sequence: Synthetic oligonucleotide
  Description of Combined DNA/RNA Molecule: Synthetic oligonucleotide
ugcaaacaggatacagucucacc

SEQ ID NO: 2346 - RNA, 23 nt, Artificial Sequence
  Description of Artificial Sequence: Synthetic oligonucleotide
uagcaaacaggauacagucucac

SEQ ID NO: 2347 - DNA, 23 bp, Artificial Sequence
  Description of Artificial Sequence: Synthetic oligonucleotide
  Description of Combined DNA/RNA Molecule: Synthetic oligonucleotide
utagcaaacaggauacagucuca

SEQ ID NO: 2348 - DNA, 23 bp, Artificial Sequence
  Description of Artificial Sequence: Synthetic oligonucleotide
  Description of Combined DNA/RNA Molecule: Synthetic oligonucleotide
ucaatagcaaacaggauacaguc

SEQ ID NO: 2349 - DNA, 23 bp, Artificial Sequence
  Description of Artificial Sequence: Synthetic oligonucleotide
  Description of Combined DNA/RNA Molecule: Synthetic oligonucleotide
ucuutuacugaccaugcgagcuu

SEQ ID NO: 2350 - DNA, 23 bp, Artificial Sequence
  Description of Artificial Sequence: Synthetic oligonucleotide
  Description of Combined DNA/RNA Molecule: Synthetic oligonucleotide
ugcututacugaccaugcgagcu

SEQ ID NO: 2351 - DNA, 23 bp, Artificial Sequence
  Description of Artificial Sequence: Synthetic oligonucleotide
  Description of Combined DNA/RNA Molecule: Synthetic oligonucleotide
uccgtctuugctuuuacugacca

SEQ ID NO: 2352 - RNA, 23 nt, Artificial Sequence
  Description of Artificial Sequence: Synthetic oligonucleotide
ucccgucuuugcuuuuacugacc

SEQ ID NO: 2353 - DNA, 23 bp, Artificial Sequence
  Description of Artificial Sequence: Synthetic oligonucleotide
  Description of Combined DNA/RNA Molecule: Synthetic oligonucleotide
utcccgtcuuugcuuuuacugac

SEQ ID NO: 2354 - DNA, 23 bp, Artificial Sequence
  Description of Artificial Sequence: Synthetic oligonucleotide
  Description of Combined DNA/RNA Molecule: Synthetic oligonucleotide
ucgggacgugutugauauuaucc

SEQ ID NO: 2355 - RNA, 23 nt, Artificial Sequence
  Description of Artificial Sequence: Synthetic oligonucleotide
ucccgggacguguuugauauuau

SEQ ID NO: 2356 - RNA, 23 nt, Artificial Sequence
  Description of Artificial Sequence: Synthetic oligonucleotide
ucucccgggacguguuugauauu

SEQ ID NO: 2357 - RNA, 23 nt, Artificial Sequence
  Description of Artificial Sequence: Synthetic oligonucleotide
uccucccgggacguguuugauau

SEQ ID NO: 2358 - RNA, 23 nt, Artificial Sequence
  Description of Artificial Sequence: Synthetic oligonucleotide
ucugccgccucccgggacguguu

SEQ ID NO: 2359 - DNA, 23 bp, Artificial Sequence
  Description of Artificial Sequence: Synthetic oligonucleotide
  Description of Combined DNA/RNA Molecule: Synthetic oligonucleotide
ucacactgccgccucccgggacg

SEQ ID NO: 2360 - DNA, 23 bp, Artificial Sequence
  Description of Artificial Sequence: Synthetic oligonucleotide
  Description of Combined DNA/RNA Molecule: Synthetic oligonucleotide
ucuggutuguagacuauuugcac

SEQ ID NO: 2361 - RNA, 23 nt, Artificial Sequence
  Description of Artificial Sequence: Synthetic oligonucleotide
ucaacugguuuguagacuauuug

SEQ ID NO: 2362 - DNA, 23 bp, Artificial Sequence
  Description of Artificial Sequence: Synthetic oligonucleotide
  Description of Combined DNA/RNA Molecule: Synthetic oligonucleotide
ugucaacuggutuguagacuauu

SEQ ID NO: 2363 - DNA, 23 bp, Artificial Sequence
  Description of Artificial Sequence: Synthetic oligonucleotide
  Description of Combined DNA/RNA Molecule: Synthetic oligonucleotide
ucuggutuaugauggauguugcc

SEQ ID NO: 2364 - DNA, 23 bp, Artificial Sequence
  Description of Artificial Sequence: Synthetic oligonucleotide
  Description of Combined DNA/RNA Molecule: Synthetic oligonucleotide
uccucctgguutaugauggaugu

SEQ ID NO: 2365 - DNA, 23 bp, Artificial Sequence
  Description of Artificial Sequence: Synthetic oligonucleotide
  Description of Combined DNA/RNA Molecule: Synthetic oligonucleotide
ucaccuccuggtuuaugauggau

SEQ ID NO: 2366 - DNA, 23 bp, Artificial Sequence
  Description of Artificial Sequence: Synthetic oligonucleotide
  Description of Combined DNA/RNA Molecule: Synthetic oligonucleotide
uccacctccugguuuaugaugga

SEQ ID NO: 2367 - DNA, 23 bp, Artificial Sequence
  Description of Artificial Sequence: Synthetic oligonucleotide
  Description of Combined DNA/RNA Molecule: Synthetic oligonucleotide
uccacctggccaccuccugguuu

SEQ ID NO: 2368 - DNA, 23 bp, Artificial Sequence
  Description of Artificial Sequence: Synthetic oligonucleotide
  Description of Combined DNA/RNA Molecule: Synthetic oligonucleotide
ucagcutcuuatuaauuaucugc

SEQ ID NO: 2369 - DNA, 23 bp, Artificial Sequence
  Description of Artificial Sequence: Synthetic oligonucleotide
  Description of Combined DNA/RNA Molecule: Synthetic oligonucleotide
uaagauccagctucuuauuaauu

SEQ ID NO: 2370 - RNA, 23 nt, Artificial Sequence
  Description of Artificial Sequence: Synthetic oligonucleotide
ugcuaagauccagcuucuuauua

SEQ ID NO: 2371 - DNA, 23 bp, Artificial Sequence
  Description of Artificial Sequence: Synthetic oligonucleotide
  Description of Combined DNA/RNA Molecule: Synthetic oligonucleotide
ugacgutgcuaagauccagcuuc

SEQ ID NO: 2372 - DNA, 23 bp, Artificial Sequence
  Description of Artificial Sequence: Synthetic oligonucleotide
  Description of Combined DNA/RNA Molecule: Synthetic oligonucleotide
uggacgtugcuaagauccagcuu

SEQ ID NO: 2373 - RNA, 23 nt, Artificial Sequence
  Description of Artificial Sequence: Synthetic oligonucleotide
ucuggacguugcuaagauccagc

SEQ ID NO: 2374 - DNA, 23 bp, Artificial Sequence
  Description of Artificial Sequence: Synthetic oligonucleotide
  Description of Combined DNA/RNA Molecule: Synthetic oligonucleotide
uacacutggactggacguugcua

SEQ ID NO: 2375 - DNA, 23 bp, Artificial Sequence
  Description of Artificial Sequence: Synthetic oligonucleotide
  Description of Combined DNA/RNA Molecule: Synthetic oligonucleotide
ucacactuggacuggacguugcu

SEQ ID NO: 2376 - RNA, 23 nt, Artificial Sequence
  Description of Artificial Sequence: Synthetic oligonucleotide
uccacacuuggacuggacguugc

SEQ ID NO: 2377 - DNA, 23 bp, Artificial Sequence
  Description of Artificial Sequence: Synthetic oligonucleotide
  Description of Combined DNA/RNA Molecule: Synthetic oligonucleotide
uccutugagccacacuuggacug

SEQ ID NO: 2378 - DNA, 23 bp, Artificial Sequence
  Description of Artificial Sequence: Synthetic oligonucleotide
  Description of Combined DNA/RNA Molecule: Synthetic oligonucleotide
utcctutgagccacacuuggacu

SEQ ID NO: 2379 - DNA, 23 bp, Artificial Sequence
  Description of Artificial Sequence: Synthetic oligonucleotide
  Description of Combined DNA/RNA Molecule: Synthetic oligonucleotide
uauccutugagccacacuuggac

SEQ ID NO: 2380 - DNA, 23 bp, Artificial Sequence
  Description of Artificial Sequence: Synthetic oligonucleotide
  Description of Combined DNA/RNA Molecule: Synthetic oligonucleotide
ugauautaucctuugagccacac

SEQ ID NO: 2381 - DNA, 23 bp, Artificial Sequence
  Description of Artificial Sequence: Synthetic oligonucleotide
  Description of Combined DNA/RNA Molecule: Synthetic oligonucleotide
utugauauuauccuuugagccac

SEQ ID NO: 2382 - DNA, 23 bp, Artificial Sequence
  Description of Artificial Sequence: Synthetic oligonucleotide
  Description of Combined DNA/RNA Molecule: Synthetic oligonucleotide
uggacgtguuugauauuauccuu

SEQ ID NO: 2383 - RNA, 21 nt, Artificial Sequence
  Description of Artificial Sequence: Synthetic oligonucleotide
caugaucuucuuugucguaga

SEQ ID NO: 2384 - RNA, 21 nt, Artificial Sequence
  Description of Artificial Sequence: Synthetic oligonucleotide
ugucgaguacacuuuuacuga

SEQ ID NO: 2385 - RNA, 21 nt, Artificial Sequence
  Description of Artificial Sequence: Synthetic oligonucleotide
gagaauucacuuuucuucgua

SEQ ID NO: 2386 - RNA, 21 nt, Artificial Sequence
  Description of Artificial Sequence: Synthetic oligonucleotide
augaucuucuuugucguagua

SEQ ID NO: 2387 - RNA, 21 nt, Artificial Sequence
  Description of Artificial Sequence: Synthetic oligonucleotide
ugaucuucuuugucguaguga

SEQ ID NO: 2388 - RNA, 21 nt, Artificial Sequence
  Description of Artificial Sequence: Synthetic oligonucleotide
auauauuuuacaacauccgua

SEQ ID NO: 2389 - RNA, 21 nt, Artificial Sequence
  Description of Artificial Sequence: Synthetic oligonucleotide
augaucuucuuugucguagua

SEQ ID NO: 2390 - RNA, 21 nt, Artificial Sequence
  Description of Artificial Sequence: Synthetic oligonucleotide
ugaucuucuuugucguaguga

SEQ ID NO: 2391 - RNA, 21 nt, Artificial Sequence
  Description of Artificial Sequence: Synthetic oligonucleotide
uauuuuacaacauccguuaua

SEQ ID NO: 2392 - RNA, 19 nt, Artificial Sequence
  Description of Artificial Sequence: Synthetic oligonucleotide
ugaucuucuuugucguaga

SEQ ID NO: 2393 - RNA, 21 nt, Artificial Sequence
  Description of Artificial Sequence: Synthetic oligonucleotide
ccugaagcauaaauguuuuca

SEQ ID NO: 2394 - RNA, 21 nt, Artificial Sequence
  Description of Artificial Sequence: Synthetic oligonucleotide
uaaauguuuucgaaauucaca

SEQ ID NO: 2395 - RNA, 21 nt, Artificial Sequence
  Description of Artificial Sequence: Synthetic oligonucleotide
ucuuugucguagugauuuuca

SEQ ID NO: 2396 - RNA, 21 nt, Artificial Sequence
  Description of Artificial Sequence: Synthetic oligonucleotide
uuuacaacauccguuauuaca

SEQ ID NO: 2397 - RNA, 21 nt, Artificial Sequence
  Description of Artificial Sequence: Synthetic oligonucleotide
uugauaguuaccuaguuugca

SEQ ID NO: 2398 - RNA, 21 nt, Artificial Sequence
  Description of Artificial Sequence: Synthetic oligonucleotide
uaaauguuuucgaaauucaca

SEQ ID NO: 2399 - RNA, 21 nt, Artificial Sequence
  Description of Artificial Sequence: Synthetic oligonucleotide
ucuuugucguagugauuuuca

SEQ ID NO: 2400 - RNA, 19 nt, Artificial Sequence
  Description of Artificial Sequence: Synthetic oligonucleotide
gauaguuaccuaguuugca

SEQ ID NO: 2401 - RNA, 21 nt, Artificial Sequence
  Description of Artificial Sequence: Synthetic oligonucleotide
caacacaauuucuucuuagca

SEQ ID NO: 2402 - RNA, 19 nt, Artificial Sequence
  Description of Artificial Sequence: Synthetic oligonucleotide
acacaauuucuucuuagca

SEQ ID NO: 2403 - RNA, 21 nt, Artificial Sequence
  Description of Artificial Sequence: Synthetic oligonucleotide
agggaaaacaaucuuccguua

SEQ ID NO: 2404 - RNA, 21 nt, Artificial Sequence
  Description of Artificial Sequence: Synthetic oligonucleotide
uguaggagaauucauuuuuca

SEQ ID NO: 2405 - RNA, 21 nt, Artificial Sequence
  Description of Artificial Sequence: Synthetic oligonucleotide
aggagaauucacuuuucuuca

SEQ ID NO: 2406 - RNA, 21 nt, Artificial Sequence
  Description of Artificial Sequence: Synthetic oligonucleotide
agcauaaauguuuucgaaaua

SEQ ID NO: 2407 - RNA, 21 nt, Artificial Sequence
  Description of Artificial Sequence: Synthetic oligonucleotide
guagaucuugcaauuaccaua

SEQ ID NO: 2408 - RNA, 21 nt, Artificial Sequence
  Description of Artificial Sequence: Synthetic oligonucleotide
auuuuacaacauccguuauua

SEQ ID NO: 2409 - RNA, 21 nt, Artificial Sequence
  Description of Artificial Sequence: Synthetic oligonucleotide
guagaucuugcaauuaccaua

SEQ ID NO: 2410 - RNA, 21 nt, Artificial Sequence
  Description of Artificial Sequence: Synthetic oligonucleotide
agcauaaauguuuucgaaaua

SEQ ID NO: 2411 - RNA, 21 nt, Artificial Sequence
  Description of Artificial Sequence: Synthetic oligonucleotide
uguaggagaauucauuuuuca

SEQ ID NO: 2412 - RNA, 21 nt, Artificial Sequence
  Description of Artificial Sequence: Synthetic oligonucleotide
acaaagggaaaacaaucuuca

SEQ ID NO: 2413 - RNA, 21 nt, Artificial Sequence
  Description of Artificial Sequence: Synthetic oligonucleotide
caaagggaaaacaaucuucca

SEQ ID NO: 2414 - RNA, 21 nt, Artificial Sequence
  Description of Artificial Sequence: Synthetic oligonucleotide
ggaaaacaaucuuccguuuca

SEQ ID NO: 2415 - RNA, 21 nt, Artificial Sequence
  Description of Artificial Sequence: Synthetic oligonucleotide
uguaggagaauucauuuuuca

SEQ ID NO: 2416 - RNA, 21 nt, Artificial Sequence
  Description of Artificial Sequence: Synthetic oligonucleotide
guaggagaauucacuuuucua

SEQ ID NO: 2417 - RNA, 21 nt, Artificial Sequence
  Description of Artificial Sequence: Synthetic oligonucleotide
uaggagaauucacuuuucuua

SEQ ID NO: 2418 - RNA, 21 nt, Artificial Sequence
  Description of Artificial Sequence: Synthetic oligonucleotide
uacaugaucuucuuugucgua

SEQ ID NO: 2419 - RNA, 21 nt, Artificial Sequence
  Description of Artificial Sequence: Synthetic oligonucleotide
uugauaguuaccuaguuugca

SEQ ID NO: 2420 - RNA, 21 nt, Artificial Sequence
  Description of Artificial Sequence: Synthetic oligonucleotide
uugauaguuaccuaguuugca

SEQ ID NO: 2421 - RNA, 21 nt, Artificial Sequence
  Description of Artificial Sequence: Synthetic oligonucleotide
uugauaguuaccuaauuugca

SEQ ID NO: 2422 - RNA, 19 nt, Artificial Sequence
  Description of Artificial Sequence: Synthetic oligonucleotide
gauaguuaccuaguuugca

SEQ ID NO: 2423 - RNA, 21 nt, Artificial Sequence
  Description of Artificial Sequence: Synthetic oligonucleotide
caugaucuucuuugucguaga

SEQ ID NO: 2424 - RNA, 21 nt, Artificial Sequence
  Description of Artificial Sequence: Synthetic oligonucleotide
caugaucuucuuugucguaga

SEQ ID NO: 2425 - RNA, 21 nt, Artificial Sequence
  Description of Artificial Sequence: Synthetic oligonucleotide
caugaucuucuuugucguaga

SEQ ID NO: 2426 - RNA, 21 nt, Artificial Sequence
  Description of Artificial Sequence: Synthetic oligonucleotide
gggaaaacaaucuuccguuua

SEQ ID NO: 2427 - RNA, 21 nt, Artificial Sequence
  Description of Artificial Sequence: Synthetic oligonucleotide
aaaacaaucuuccguuucaaa

SEQ ID NO: 2428 - RNA, 21 nt, Artificial Sequence
  Description of Artificial Sequence: Synthetic oligonucleotide
ggagaauucacuuuucuucga

SEQ ID NO: 2429 - RNA, 21 nt, Artificial Sequence
  Description of Artificial Sequence: Synthetic oligonucleotide
uguagaucuugcaauuaccaa

SEQ ID NO: 2430 - RNA, 21 nt, Artificial Sequence
  Description of Artificial Sequence: Synthetic oligonucleotide
gauauauuuuacaacauccga

SEQ ID NO: 2431 - RNA, 21 nt, Artificial Sequence
  Description of Artificial Sequence: Synthetic oligonucleotide
caaguguuccuacugucauga

SEQ ID NO: 2432 - RNA, 21 nt, Artificial Sequence
  Description of Artificial Sequence: Synthetic oligonucleotide
aaaacaaucuuccguuucaaa

SEQ ID NO: 2433 - RNA, 21 nt, Artificial Sequence
  Description of Artificial Sequence: Synthetic oligonucleotide
ggagaauucacuuuucuucga

SEQ ID NO: 2434 - RNA, 19 nt, Artificial Sequence
  Description of Artificial Sequence: Synthetic oligonucleotide
ucgaguacacuuuuacuga

SEQ ID NO: 2435 - RNA, 21 nt, Artificial Sequence
  Description of Artificial Sequence: Synthetic oligonucleotide
auauuuuacaacauccguuaa

SEQ ID NO: 2436 - RNA, 21 nt, Artificial Sequence
  Description of Artificial Sequence: Synthetic oligonucleotide
uuuuacaacauccguuauuaa

SEQ ID NO: 2437 - RNA, 21 nt, Artificial Sequence
  Description of Artificial Sequence: Synthetic oligonucleotide
ugucgaguacacuuuuacuga

SEQ ID NO: 2438 - RNA, 21 nt, Artificial Sequence
  Description of Artificial Sequence: Synthetic oligonucleotide
gaaaacaaucuuccauuucaa

SEQ ID NO: 2439 - RNA, 21 nt, Artificial Sequence
  Description of Artificial Sequence: Synthetic oligonucleotide
gaaaacaaucuuccauuucaa

SEQ ID NO: 2440 - RNA, 21 nt, Artificial Sequence
  Description of Artificial Sequence: Synthetic oligonucleotide
cacaaagggaaaacaaucuua

SEQ ID NO: 2441 - RNA, 21 nt, Artificial Sequence
  Description of Artificial Sequence: Synthetic oligonucleotide
aaagggaaaacaaucuuccga

SEQ ID NO: 2442 - RNA, 21 nt, Artificial Sequence
  Description of Artificial Sequence: Synthetic oligonucleotide
aaagggaaaacaaucuuccga

SEQ ID NO: 2443 - RNA, 21 nt, Artificial Sequence
  Description of Artificial Sequence: Synthetic oligonucleotide
agggaaaacaaucuuccguua

SEQ ID NO: 2444 - RNA, 21 nt, Artificial Sequence
  Description of Artificial Sequence: Synthetic oligonucleotide
aaaacaaucuuccguuucaaa

SEQ ID NO: 2445 - RNA, 21 nt, Artificial Sequence
  Description of Artificial Sequence: Synthetic oligonucleotide
guaggagaauucacuuuucua

SEQ ID NO: 2446 - RNA, 21 nt, Artificial Sequence
  Description of Artificial Sequence: Synthetic oligonucleotide
uaggagaauucacuuuucuua

SEQ ID NO: 2447 - RNA, 21 nt, Artificial Sequence
  Description of Artificial Sequence: Synthetic oligonucleotide
ggagaauucacuuuucuucga

SEQ ID NO: 2448 - RNA, 21 nt, Artificial Sequence
  Description of Artificial Sequence: Synthetic oligonucleotide
cugaagcauaaauguuuucga

SEQ ID NO: 2449 - RNA, 21 nt, Artificial Sequence
  Description of Artificial Sequence: Synthetic oligonucleotide
gaagcauaaauguuuucgaaa

SEQ ID NO: 2450 - RNA, 21 nt, Artificial Sequence
  Description of Artificial Sequence: Synthetic oligonucleotide
gaagcauaaauguuuucgaaa

SEQ ID NO: 2451 - RNA, 21 nt, Artificial Sequence
  Description of Artificial Sequence: Synthetic oligonucleotide
agcauaaauguuuuugaaaua

SEQ ID NO: 2452 - RNA, 21 nt, Artificial Sequence
  Description of Artificial Sequence: Synthetic oligonucleotide
auaaauguuuucgaaauucaa

SEQ ID NO: 2453 - RNA, 21 nt, Artificial Sequence
  Description of Artificial Sequence: Synthetic oligonucleotide
uacaugaucuucuuugucgua

SEQ ID NO: 2454 - RNA, 21 nt, Artificial Sequence
  Description of Artificial Sequence: Synthetic oligonucleotide
uaugugaaacaaacuuuacga

SEQ ID NO: 2455 - RNA, 21 nt, Artificial Sequence
  Description of Artificial Sequence: Synthetic oligonucleotide
gugaaacaaaccuuacgugaa

SEQ ID NO: 2456 - RNA, 21 nt, Artificial Sequence
  Description of Artificial Sequence: Synthetic oligonucleotide
gugaaacaaaccuuacgugaa

SEQ ID NO: 2457 - RNA, 21 nt, Artificial Sequence
  Description of Artificial Sequence: Synthetic oligonucleotide
gauauauuuuacaacauccga

SEQ ID NO: 2458 - RNA, 21 nt, Artificial Sequence
  Description of Artificial Sequence: Synthetic oligonucleotide
auauauuuuacaacauccgua

SEQ ID NO: 2459 - RNA, 21 nt, Artificial Sequence
  Description of Artificial Sequence: Synthetic oligonucleotide
auauuuuacaacauccguuaa

SEQ ID NO: 2460 - RNA, 21 nt, Artificial Sequence
  Description of Artificial Sequence: Synthetic oligonucleotide
auuuuacaacauccguuauua

SEQ ID NO: 2461 - RNA, 21 nt, Artificial Sequence
  Description of Artificial Sequence: Synthetic oligonucleotide
aaaacaaucuuccguuucaaa

SEQ ID NO: 2462 - RNA, 21 nt, Artificial Sequence
  Description of Artificial Sequence: Synthetic oligonucleotide
ggagaauucacuuuucuucga

SEQ ID NO: 2463 - RNA, 21 nt, Artificial Sequence
  Description of Artificial Sequence: Synthetic oligonucleotide
cugaagcauaaauguuuucga

SEQ ID NO: 2464 - RNA, 21 nt, Artificial Sequence
  Description of Artificial Sequence: Synthetic oligonucleotide
gaagcauaaauguuuucgaaa

SEQ ID NO: 2465 - RNA, 21 nt, Artificial Sequence
  Description of Artificial Sequence: Synthetic oligonucleotide
agcauaaauguuuuugaaaua

SEQ ID NO: 2466 - RNA, 21 nt, Artificial Sequence
  Description of Artificial Sequence: Synthetic oligonucleotide
auaaauguuuucgaaauucaa

SEQ ID NO: 2467 - RNA, 21 nt, Artificial Sequence
  Description of Artificial Sequence: Synthetic oligonucleotide
uacaugaucuucuuugucgua

SEQ ID NO: 2468 - RNA, 21 nt, Artificial Sequence
  Description of Artificial Sequence: Synthetic oligonucleotide
gaagcauaaauguuuucgaaa

SEQ ID NO: 2469 - RNA, 19 nt, Artificial Sequence
  Description of Artificial Sequence: Synthetic oligonucleotide
ucgaguacacuuuuacuga

SEQ ID NO: 2470 - RNA, 23 nt, Artificial Sequence
  Description of Artificial Sequence: Synthetic oligonucleotide
ucuacgacaaagaagaucaugug

SEQ ID NO: 2471 - RNA, 23 nt, Artificial Sequence
  Description of Artificial Sequence: Synthetic oligonucleotide
ucuacgacaaagaagaucaugcc

SEQ ID NO: 2472 - RNA, 23 nt, Artificial Sequence
  Description of Artificial Sequence: Synthetic oligonucleotide
ucuacgacaaagaagaucaugug

SEQ ID NO: 2473 - DNA, 23 bp, Artificial Sequence
  Description of Artificial Sequence: Synthetic oligonucleotide
  Description of Combined DNA/RNA Molecule: Synthetic oligonucleotide
ucagtaaaaguguactcgacauu

SEQ ID NO: 2474 - RNA, 23 nt, Artificial Sequence
  Description of Artificial Sequence: Synthetic oligonucleotide
uacgaagaaaagugaauucuccu

SEQ ID NO: 2475 - RNA, 23 nt, Artificial Sequence
  Description of Artificial Sequence: Synthetic oligonucleotide
uacuacgacaaagaagaucaugu

SEQ ID NO: 2476 - DNA, 23 bp, Artificial Sequence
  Description of Artificial Sequence: Synthetic oligonucleotide
  Description of Combined DNA/RNA Molecule: Synthetic oligonucleotide
ucactacgacaaagaagaucaug

SEQ ID NO: 2477 - DNA, 23 bp, Artificial Sequence
  Description of Artificial Sequence: Synthetic oligonucleotide
  Description of Combined DNA/RNA Molecule: Synthetic oligonucleotide
uacggatguugtaaaauauaucg

SEQ ID NO: 2478 - RNA, 23 nt, Artificial Sequence
  Description of Artificial Sequence: Synthetic oligonucleotide
uacuacgacaaagaagaucaugu

SEQ ID NO: 2479 - DNA, 23 bp, Artificial Sequence
  Description of Artificial Sequence: Synthetic oligonucleotide
  Description of Combined DNA/RNA Molecule: Synthetic oligonucleotide
ucactacgacaaagaagaucaug

SEQ ID NO: 2480 - DNA, 23 bp, Artificial Sequence
  Description of Artificial Sequence: Synthetic oligonucleotide
  Description of Combined DNA/RNA Molecule: Synthetic oligonucleotide
uauaacggaugtuguaaaauaug

SEQ ID NO: 2481 - RNA, 21 nt, Artificial Sequence
  Description of Artificial Sequence: Synthetic oligonucleotide
ucuacgacaaagaagaucaug

SEQ ID NO: 2482 - RNA, 23 nt, Artificial Sequence
  Description of Artificial Sequence: Synthetic oligonucleotide
ugaaaacauuuaugcuucagguu

SEQ ID NO: 2483 - DNA, 23 bp, Artificial Sequence
  Description of Artificial Sequence: Synthetic oligonucleotide
  Description of Combined DNA/RNA Molecule: Synthetic oligonucleotide
ugugaatuucgaaaacauuuaug

SEQ ID NO: 2484 - DNA, 23 bp, Artificial Sequence
  Description of Artificial Sequence: Synthetic oligonucleotide
  Description of Combined DNA/RNA Molecule: Synthetic oligonucleotide
ugaaaatcacuacgacaaagagg

SEQ ID NO: 2485 - RNA, 23 nt, Artificial Sequence
  Description of Artificial Sequence: Synthetic oligonucleotide
uguaauaacggauguuguaaagu

SEQ ID NO: 2486 - DNA, 23 bp, Artificial Sequence
  Description of Artificial Sequence: Synthetic oligonucleotide
  Description of Combined DNA/RNA Molecule: Synthetic oligonucleotide
ugcaaacuaggtaacuaucaagg

SEQ ID NO: 2487 - DNA, 23 bp, Artificial Sequence
  Description of Artificial Sequence: Synthetic oligonucleotide
  Description of Combined DNA/RNA Molecule: Synthetic oligonucleotide
ugcaaacuaggtaacuaucaagg

SEQ ID NO: 2488 - DNA, 23 bp, Artificial Sequence
  Description of Artificial Sequence: Synthetic oligonucleotide
  Description of Combined DNA/RNA Molecule: Synthetic oligonucleotide
ugugaatuucgaaaacauuuaug

SEQ ID NO: 2489 - DNA, 23 bp, Artificial Sequence
  Description of Artificial Sequence: Synthetic oligonucleotide
  Description of Combined DNA/RNA Molecule: Synthetic oligonucleotide
ugaaaatcacuacgacaaagagg

SEQ ID NO: 2490 - DNA, 21 bp, Artificial Sequence
  Description of Artificial Sequence: Synthetic oligonucleotide
  Description of Combined DNA/RNA Molecule: Synthetic oligonucleotide
ugcaaacuaggtaacuaucgg

SEQ ID NO: 2491 - RNA, 23 nt, Artificial Sequence
  Description of Artificial Sequence: Synthetic oligonucleotide
ugcuaagaagaaauuguguuguu

SEQ ID NO: 2492 - RNA, 21 nt, Artificial Sequence
  Description of Artificial Sequence: Synthetic oligonucleotide
ugcuaagaagaaauuguguug

SEQ ID NO: 2493 - DNA, 23 bp, Artificial Sequence
  Description of Artificial Sequence: Synthetic oligonucleotide
  Description of Combined DNA/RNA Molecule: Synthetic oligonucleotide
uaacggaagautguuuucccuuu

SEQ ID NO: 2494 - DNA, 23 bp, Artificial Sequence
  Description of Artificial Sequence: Synthetic oligonucleotide
  Description of Combined DNA/RNA Molecule: Synthetic oligonucleotide
ugaaaaaugaatucuccuacacg

SEQ ID NO: 2495 - RNA, 23 nt, Artificial Sequence
  Description of Artificial Sequence: Synthetic oligonucleotide
ugaagaaaagugaauucuccugc

SEQ ID NO: 2496 - DNA, 23 bp, Artificial Sequence
  Description of Artificial Sequence: Synthetic oligonucleotide
  Description of Combined DNA/RNA Molecule: Synthetic oligonucleotide
uauutcgaaaacauuuaugcuuc

SEQ ID NO: 2497 - RNA, 23 nt, Artificial Sequence
  Description of Artificial Sequence: Synthetic oligonucleotide
uaugguaauugcaagaucuacgg

SEQ ID NO: 2498 - RNA, 23 nt, Artificial Sequence
  Description of Artificial Sequence: Synthetic oligonucleotide
uaauaacggauguuguaaaaugu

SEQ ID NO: 2499 - RNA, 23 nt, Artificial Sequence
  Description of Artificial Sequence: Synthetic oligonucleotide
uaugguaauugcaagaucuacgg

SEQ ID NO: 2500 - DNA, 23 bp, Artificial Sequence
  Description of Artificial Sequence: Synthetic oligonucleotide
  Description of Combined DNA/RNA Molecule: Synthetic oligonucleotide
uauutcgaaaacauuuaugcuuc

SEQ ID NO: 2501 - DNA, 23 bp, Artificial Sequence
  Description of Artificial Sequence: Synthetic oligonucleotide
  Description of Combined DNA/RNA Molecule: Synthetic oligonucleotide
ugaagatuguuuucccuuugugu

SEQ ID NO: 2502 - RNA, 23 nt, Artificial Sequence
  Description of Artificial Sequence: Synthetic oligonucleotide
uggaagauuguuuucccuuugug

SEQ ID NO: 2503 - RNA, 23 nt, Artificial Sequence
  Description of Artificial Sequence: Synthetic oligonucleotide
ugaaacggaagauuguuuucccu

SEQ ID NO: 2504 - RNA, 23 nt, Artificial Sequence
  Description of Artificial Sequence: Synthetic oligonucleotide
ugaaaaaugaauucuccuacacg

SEQ ID NO: 2505 - RNA, 23 nt, Artificial Sequence
  Description of Artificial Sequence: Synthetic oligonucleotide
uagaaaagugaauucuccuacgc

SEQ ID NO: 2506 - RNA, 23 nt, Artificial Sequence
  Description of Artificial Sequence: Synthetic oligonucleotide
uaagaaaagugaauucuccuacg

SEQ ID NO: 2507 - RNA, 23 nt, Artificial Sequence
  Description of Artificial Sequence: Synthetic oligonucleotide
uacgacaaagaagaucauguacc

SEQ ID NO: 2508 - RNA, 23 nt, Artificial Sequence
  Description of Artificial Sequence: Synthetic oligonucleotide
ugcaaacuagguaacuaucaagg

SEQ ID NO: 2509 - RNA, 23 nt, Artificial Sequence
  Description of Artificial Sequence: Synthetic oligonucleotide
ugcaaacuagguaacuaucaagg

SEQ ID NO: 2510 - DNA, 23 bp, Artificial Sequence
  Description of Artificial Sequence: Synthetic oligonucleotide
  Description of Combined DNA/RNA Molecule: Synthetic oligonucleotide
ugcaaatuagguaacuaucaagg

SEQ ID NO: 2511 - RNA, 21 nt, Artificial Sequence
  Description of Artificial Sequence: Synthetic oligonucleotide
ugcaaacuagguaacuaucgg

SEQ ID NO: 2512 - DNA, 23 bp, Artificial Sequence
  Description of Artificial Sequence: Synthetic oligonucleotide
  Description of Combined DNA/RNA Molecule: Synthetic oligonucleotide
ucagtaaaaguguactcgacauu

SEQ ID NO: 2513 - RNA, 23 nt, Artificial Sequence
  Description of Artificial Sequence: Synthetic oligonucleotide
ucuacgacaaagaagaucaugug

SEQ ID NO: 2514 - RNA, 23 nt, Artificial Sequence
  Description of Artificial Sequence: Synthetic oligonucleotide
ucuacgacaaagaagaucaugug

SEQ ID NO: 2515 - RNA, 23 nt, Artificial Sequence
  Description of Artificial Sequence: Synthetic oligonucleotide
ucuacgacaaagaagaucaugcc

SEQ ID NO: 2516 - RNA, 21 nt, Artificial Sequence
  Description of Artificial Sequence: Synthetic oligonucleotide
ucuacgacaaagaagaucaug

SEQ ID NO: 2517 - DNA, 23 bp, Artificial Sequence
  Description of Artificial Sequence: Synthetic oligonucleotide
  Description of Combined DNA/RNA Molecule: Synthetic oligonucleotide
uaaacggaagatuguuuucccuu

SEQ ID NO: 2518 - RNA, 23 nt, Artificial Sequence
  Description of Artificial Sequence: Synthetic oligonucleotide
uuugaaacggaagauuguuuucc

SEQ ID NO: 2519 - DNA, 23 bp, Artificial Sequence
  Description of Artificial Sequence: Synthetic oligonucleotide
  Description of Combined DNA/RNA Molecule: Synthetic oligonucleotide
ucgaagaaaagtgaauucuccug

SEQ ID NO: 2520 - DNA, 23 bp, Artificial Sequence
  Description of Artificial Sequence: Synthetic oligonucleotide
  Description of Combined DNA/RNA Molecule: Synthetic oligonucleotide
uuggtaauugcaagaucuacagg

SEQ ID NO: 2521 - RNA, 23 nt, Artificial Sequence
  Description of Artificial Sequence: Synthetic oligonucleotide
ucggauguuguaaaauauaucgc

SEQ ID NO: 2522 - RNA, 23 nt, Artificial Sequence
  Description of Artificial Sequence: Synthetic oligonucleotide
ucaugacaguaggaacacuuggg

SEQ ID NO: 2523 - RNA, 23 nt, Artificial Sequence
  Description of Artificial Sequence: Synthetic oligonucleotide
uuugaaacggaagauuguuuucc

SEQ ID NO: 2524 - DNA, 23 bp, Artificial Sequence
  Description of Artificial Sequence: Synthetic oligonucleotide
  Description of Combined DNA/RNA Molecule: Synthetic oligonucleotide
ucgaagaaaagtgaauucuccug

SEQ ID NO: 2525 - DNA, 23 bp, Artificial Sequence
  Description of Artificial Sequence: Synthetic oligonucleotide
  Description of Combined DNA/RNA Molecule: Synthetic oligonucleotide
ucagtaaaaguguactcgacauu

SEQ ID NO: 2526 - DNA, 23 bp, Artificial Sequence
  Description of Artificial Sequence: Synthetic oligonucleotide
  Description of Combined DNA/RNA Molecule: Synthetic oligonucleotide
ucagtaaaaguguactcgacacc

SEQ ID NO: 2527 - DNA, 21 bp, Artificial Sequence
  Description of Artificial Sequence: Synthetic oligonucleotide
  Description of Combined DNA/RNA Molecule: Synthetic oligonucleotide
ucagtaaaaguguactcgacg

SEQ ID NO: 2528 - DNA, 23 bp, Artificial Sequence
  Description of Artificial Sequence: Synthetic oligonucleotide
  Description of Combined DNA/RNA Molecule: Synthetic oligonucleotide
ucagtaaaaguguactcgacauu

SEQ ID NO: 2529 - DNA, 23 bp, Artificial Sequence
  Description of Artificial Sequence: Synthetic oligonucleotide
  Description of Combined DNA/RNA Molecule: Synthetic oligonucleotide
uuaacggaugutguaaaauaugu

SEQ ID NO: 2530 - DNA, 23 bp, Artificial Sequence
  Description of Artificial Sequence: Synthetic oligonucleotide
  Description of Combined DNA/RNA Molecule: Synthetic oligonucleotide
uuaataacggatguuguaaaaug

SEQ ID NO: 2531 - DNA, 23 bp, Artificial Sequence
  Description of Artificial Sequence: Synthetic oligonucleotide
  Description of Combined DNA/RNA Molecule: Synthetic oligonucleotide
uugaaatggaagauuguuuuccc

SEQ ID NO: 2532 - DNA, 23 bp, Artificial Sequence
  Description of Artificial Sequence: Synthetic oligonucleotide
  Description of Combined DNA/RNA Molecule: Synthetic oligonucleotide
uugaaatggaagauuguuuuccc

SEQ ID NO: 2533 - DNA, 23 bp, Artificial Sequence
  Description of Artificial Sequence: Synthetic oligonucleotide
  Description of Combined DNA/RNA Molecule: Synthetic oligonucleotide
uaagautguuuucccuuuguguu

SEQ ID NO: 2534 - RNA, 23 nt, Artificial Sequence
  Description of Artificial Sequence: Synthetic oligonucleotide
ucggaagauuguuuucccuuugu

SEQ ID NO: 2535 - DNA, 23 bp, Artificial Sequence
  Description of Artificial Sequence: Synthetic oligonucleotide
  Description of Combined DNA/RNA Molecule: Synthetic oligonucleotide
ucggaagauugtuuucccuuugu

SEQ ID NO: 2536 - RNA, 23 nt, Artificial Sequence
  Description of Artificial Sequence: Synthetic oligonucleotide
uaacggaagauuguuuucccuuu

SEQ ID NO: 2537 - RNA, 23 nt, Artificial Sequence
  Description of Artificial Sequence: Synthetic oligonucleotide
uuugaaacggaagauuguuuucc

SEQ ID NO: 2538 - DNA, 23 bp, Artificial Sequence
  Description of Artificial Sequence: Synthetic oligonucleotide
  Description of Combined DNA/RNA Molecule: Synthetic oligonucleotide
ucagtaaaaguguacucgacauu

SEQ ID NO: 2539 - DNA, 23 bp, Artificial Sequence
  Description of Artificial Sequence: Synthetic oligonucleotide
  Description of Combined DNA/RNA Molecule: Synthetic oligonucleotide
ucagtaaaaguguacucgacacc

SEQ ID NO: 2540 - DNA, 23 bp, Artificial Sequence
  Description of Artificial Sequence: Synthetic oligonucleotide
  Description of Combined DNA/RNA Molecule: Synthetic oligonucleotide
ucagtaaaaguguacucgacacc

SEQ ID NO: 2541 - DNA, 21 bp, Artificial Sequence
  Description of Artificial Sequence: Synthetic oligonucleotide
  Description of Combined DNA/RNA Molecule: Synthetic oligonucleotide
ucagtaaaaguguacucgacg

SEQ ID NO: 2542 - RNA, 23 nt, Artificial Sequence
  Description of Artificial Sequence: Synthetic oligonucleotide
uagaaaagugaauucuccuacgc

SEQ ID NO: 2543 - RNA, 23 nt, Artificial Sequence
  Description of Artificial Sequence: Synthetic oligonucleotide
uaagaaaagugaauucuccuacg

SEQ ID NO: 2544 - RNA, 23 nt, Artificial Sequence
  Description of Artificial Sequence: Synthetic oligonucleotide
ucgaagaaaagugaauucuccug

SEQ ID NO: 2545 - RNA, 23 nt, Artificial Sequence
  Description of Artificial Sequence: Synthetic oligonucleotide
ucgaaaacauuuaugcuucaggu

SEQ ID NO: 2546 - DNA, 23 bp, Artificial Sequence
  Description of Artificial Sequence: Synthetic oligonucleotide
  Description of Combined DNA/RNA Molecule: Synthetic oligonucleotide
uuucgaaaacatuuaugcuucag

SEQ ID NO: 2547 - RNA, 23 nt, Artificial Sequence
  Description of Artificial Sequence: Synthetic oligonucleotide
uuucgaaaacauuuaugcuucag

SEQ ID NO: 2548 - DNA, 23 bp, Artificial Sequence
  Description of Artificial Sequence: Synthetic oligonucleotide
  Description of Combined DNA/RNA Molecule: Synthetic oligonucleotide
uauutcaaaaacauuuaugcuuc

SEQ ID NO: 2549 - DNA, 23 bp, Artificial Sequence
  Description of Artificial Sequence: Synthetic oligonucleotide
  Description of Combined DNA/RNA Molecule: Synthetic oligonucleotide
uugaautucgaaaacauuuaugc

SEQ ID NO: 2550 - DNA, 23 bp, Artificial Sequence
  Description of Artificial Sequence: Synthetic oligonucleotide
  Description of Combined DNA/RNA Molecule: Synthetic oligonucleotide
uugaautucgaaaacauuuaugu

SEQ ID NO: 2551 - RNA, 23 nt, Artificial Sequence
  Description of Artificial Sequence: Synthetic oligonucleotide
uacgacaaagaagaucauguagg

SEQ ID NO: 2552 - RNA, 23 nt, Artificial Sequence
  Description of Artificial Sequence: Synthetic oligonucleotide
ucuacgacaaagaagaucaugug

SEQ ID NO: 2553 - RNA, 23 nt, Artificial Sequence
  Description of Artificial Sequence: Synthetic oligonucleotide
ucguaaaguuuguuucacauagu

SEQ ID NO: 2554 - DNA, 23 bp, Artificial Sequence
  Description of Artificial Sequence: Synthetic oligonucleotide
  Description of Combined DNA/RNA Molecule: Synthetic oligonucleotide
uucacgtaaggtuuguuucacgu

SEQ ID NO: 2555 - DNA, 23 bp, Artificial Sequence
  Description of Artificial Sequence: Synthetic oligonucleotide
  Description of Combined DNA/RNA Molecule: Synthetic oligonucleotide
uucacgtaagguuuguuucacgu

SEQ ID NO: 2556 - RNA, 23 nt, Artificial Sequence
  Description of Artificial Sequence: Synthetic oligonucleotide
ucggauguuguaaaauauaucgc

SEQ ID NO: 2557 - DNA, 23 bp, Artificial Sequence
  Description of Artificial Sequence: Synthetic oligonucleotide
  Description of Combined DNA/RNA Molecule: Synthetic oligonucleotide
uacggatguuguaaaauauaucg

SEQ ID NO: 2558 - RNA, 23 nt, Artificial Sequence
  Description of Artificial Sequence: Synthetic oligonucleotide
uuaacggauguuguaaaauaugu

SEQ ID NO: 2559 - RNA, 23 nt, Artificial Sequence
  Description of Artificial Sequence: Synthetic oligonucleotide
uaauaacggauguuguaaaaugu

SEQ ID NO: 2560 - RNA, 23 nt, Artificial Sequence
  Description of Artificial Sequence: Synthetic oligonucleotide
ucaugacaguaggaacacuuggg

SEQ ID NO: 2561 - DNA, 23 bp, Artificial Sequence
  Description of Artificial Sequence: Synthetic oligonucleotide
  Description of Combined DNA/RNA Molecule: Synthetic oligonucleotide
uuucgaaaacatuuaugcuucag

SEQ ID NO: 2562 - RNA, 21 nt, Artificial Sequence
  Description of Artificial Sequence: Synthetic oligonucleotide
cucuccaaguaugaucgucuu

SEQ ID NO: 2563 - RNA, 21 nt, Artificial Sequence
  Description of Artificial Sequence: Synthetic oligonucleotide
cagugaugcucuccaaguauu

SEQ ID NO: 2564 - RNA, 21 nt, Artificial Sequence
  Description of Artificial Sequence: Synthetic oligonucleotide
ccaaguaugaucgucugcagu

SEQ ID NO: 2565 - RNA, 21 nt, Artificial Sequence
  Description of Artificial Sequence: Synthetic oligonucleotide
ggguuuguuuguuucauuucu

SEQ ID NO: 2566 - RNA, 21 nt, Artificial Sequence
  Description of Artificial Sequence: Synthetic oligonucleotide
gaguauuucucagcauucaau

SEQ ID NO: 2567 - RNA, 23 nt, Artificial Sequence
  Description of Artificial Sequence: Synthetic oligonucleotide
aagacgaucauacuuggagagcg

SEQ ID NO: 2568 - DNA, 23 bp, Artificial Sequence
  Description of Artificial Sequence: Synthetic oligonucleotide
  Description of Combined DNA/RNA Molecule: Synthetic oligonucleotide
aauacutggagagcaucacugug

SEQ ID NO: 2569 - DNA, 23 bp, Artificial Sequence
  Description of Artificial Sequence: Synthetic oligonucleotide
  Description of Combined DNA/RNA Molecule: Synthetic oligonucleotide
acugcagacgatcauacuuggag

SEQ ID NO: 2570 - RNA, 23 nt, Artificial Sequence
  Description of Artificial Sequence: Synthetic oligonucleotide
agaaaugaaacaaacaaacccug

SEQ ID NO: 2571 - DNA, 23 bp, Artificial Sequence
  Description of Artificial Sequence: Synthetic oligonucleotide
  Description of Combined DNA/RNA Molecule: Synthetic oligonucleotide
atugaatgcugagaaauacuccc

SEQ ID NO: 2572 - RNA, 21 nt, Artificial Sequence
  Description of Artificial Sequence: Synthetic oligonucleotide
cagcuaaggcaguucuacguu

SEQ ID NO: 2573 - RNA, 21 nt, Artificial Sequence
  Description of Artificial Sequence: Synthetic oligonucleotide
uucuugggccuacuuuauauu

SEQ ID NO: 2574 - RNA, 21 nt, Artificial Sequence
  Description of Artificial Sequence: Synthetic oligonucleotide
uacuuuauaugcugaagucgu

SEQ ID NO: 2575 - RNA, 21 nt, Artificial Sequence
  Description of Artificial Sequence: Synthetic oligonucleotide
acuuuauaugcugaagucggu

SEQ ID NO: 2576 - RNA, 21 nt, Artificial Sequence
  Description of Artificial Sequence: Synthetic oligonucleotide
aguaaauuaucagaaggugcu

SEQ ID NO: 2577 - RNA, 21 nt, Artificial Sequence
  Description of Artificial Sequence: Synthetic oligonucleotide
aucagaaggugcuucuuaccu

SEQ ID NO: 2578 - RNA, 21 nt, Artificial Sequence
  Description of Artificial Sequence: Synthetic oligonucleotide
ucagaaggugcuucuuaccuu

SEQ ID NO: 2579 - RNA, 21 nt, Artificial Sequence
  Description of Artificial Sequence: Synthetic oligonucleotide
cagaaggugcuucuuaccuuu

SEQ ID NO: 2580 - RNA, 21 nt, Artificial Sequence
  Description of Artificial Sequence: Synthetic oligonucleotide
accuaugaauggaguaucagu

SEQ ID NO: 2581 - RNA, 21 nt, Artificial Sequence
  Description of Artificial Sequence: Synthetic oligonucleotide
ccuaugaauggaguaucaguu

SEQ ID NO: 2582 - RNA, 21 nt, Artificial Sequence
  Description of Artificial Sequence: Synthetic oligonucleotide
augaauggaguaucagugagu

SEQ ID NO: 2583 - RNA, 21 nt, Artificial Sequence
  Description of Artificial Sequence: Synthetic oligonucleotide
augccucacacacaucuauuu

SEQ ID NO: 2584 - RNA, 21 nt, Artificial Sequence
  Description of Artificial Sequence: Synthetic oligonucleotide
ugccucacacacaucuauuau

SEQ ID NO: 2585 - RNA, 21 nt, Artificial Sequence
  Description of Artificial Sequence: Synthetic oligonucleotide
gccucacacacaucuauuacu

SEQ ID NO: 2586 - RNA, 21 nt, Artificial Sequence
  Description of Artificial Sequence: Synthetic oligonucleotide
ccucacacacaucuauuacuu

SEQ ID NO: 2587 - RNA, 21 nt, Artificial Sequence
  Description of Artificial Sequence: Synthetic oligonucleotide
cucacacacaucuauuacucu

SEQ ID NO: 2588 - RNA, 21 nt, Artificial Sequence
  Description of Artificial Sequence: Synthetic oligonucleotide
gacguuugacaagcaaaucgu

SEQ ID NO: 2589 - RNA, 21 nt, Artificial Sequence
  Description of Artificial Sequence: Synthetic oligonucleotide
gccagucaucaucccuaaugu

SEQ ID NO: 2590 - RNA, 21 nt, Artificial Sequence
  Description of Artificial Sequence: Synthetic oligonucleotide
aauguacacagucaauggauu

SEQ ID NO: 2591 - RNA, 21 nt, Artificial Sequence
  Description of Artificial Sequence: Synthetic oligonucleotide
gccagauauaacaguuugugu

SEQ ID NO: 2592 - RNA, 21 nt, Artificial Sequence
  Description of Artificial Sequence: Synthetic oligonucleotide
ccagauauaacaguuugugcu

SEQ ID NO: 2593 - RNA, 21 nt, Artificial Sequence
  Description of Artificial Sequence: Synthetic oligonucleotide
gagcagaaccaucauaagguu

SEQ ID NO: 2594 - RNA, 21 nt, Artificial Sequence
  Description of Artificial Sequence: Synthetic oligonucleotide
cauccacuaccgcaaauaugu

SEQ ID NO: 2595 - RNA, 21 nt, Artificial Sequence
  Description of Artificial Sequence: Synthetic oligonucleotide
gcugggaugcaggcuuacauu

SEQ ID NO: 2596 - RNA, 21 nt, Artificial Sequence
  Description of Artificial Sequence: Synthetic oligonucleotide
cugggaugcaggcuuacauuu

SEQ ID NO: 2597 - RNA, 21 nt, Artificial Sequence
  Description of Artificial Sequence: Synthetic oligonucleotide
ugggaugcaggcuuacauugu

SEQ ID NO: 2598 - RNA, 21 nt, Artificial Sequence
  Description of Artificial Sequence: Synthetic oligonucleotide
ggaugcaggcuuacauugacu

SEQ ID NO: 2599 - RNA, 21 nt, Artificial Sequence
  Description of Artificial Sequence: Synthetic oligonucleotide
augcaggcuuacauugacauu

SEQ ID NO: 2600 - RNA, 21 nt, Artificial Sequence
  Description of Artificial Sequence: Synthetic oligonucleotide
aggcuuacauugacauuaaau

SEQ ID NO: 2601 - RNA, 21 nt, Artificial Sequence
  Description of Artificial Sequence: Synthetic oligonucleotide
ggcuuacauugacauuaaaau

SEQ ID NO: 2602 - RNA, 21 nt, Artificial Sequence
  Description of Artificial Sequence: Synthetic oligonucleotide
gcuuacauugacauuaaaaau

SEQ ID NO: 2603 - RNA, 21 nt, Artificial Sequence
  Description of Artificial Sequence: Synthetic oligonucleotide
cuuacauugacauuaaaaacu

SEQ ID NO: 2604 - RNA, 21 nt, Artificial Sequence
  Description of Artificial Sequence: Synthetic oligonucleotide
uuacauugacauuaaaaacuu

SEQ ID NO: 2605 - RNA, 21 nt, Artificial Sequence
  Description of Artificial Sequence: Synthetic oligonucleotide
uacauugacauuaaaaacugu

SEQ ID NO: 2606 - RNA, 21 nt, Artificial Sequence
  Description of Artificial Sequence: Synthetic oligonucleotide
acauugacauuaaaaacugcu

SEQ ID NO: 2607 - RNA, 21 nt, Artificial Sequence
  Description of Artificial Sequence: Synthetic oligonucleotide
caccuguaauaccagcgaauu

SEQ ID NO: 2608 - RNA, 21 nt, Artificial Sequence
  Description of Artificial Sequence: Synthetic oligonucleotide
uguaauaccagcgaauauggu

SEQ ID NO: 2609 - RNA, 21 nt, Artificial Sequence
  Description of Artificial Sequence: Synthetic oligonucleotide
guaauaccagcgaauauggau

SEQ ID NO: 2610 - RNA, 21 nt, Artificial Sequence
  Description of Artificial Sequence: Synthetic oligonucleotide
guuauguacacacaguacgau

SEQ ID NO: 2611 - RNA, 21 nt, Artificial Sequence
  Description of Artificial Sequence: Synthetic oligonucleotide
uuauguacacacaguacgaau

SEQ ID NO: 2612 - RNA, 21 nt, Artificial Sequence
  Description of Artificial Sequence: Synthetic oligonucleotide
guacacacaguacgaagaugu

SEQ ID NO: 2613 - RNA, 21 nt, Artificial Sequence
  Description of Artificial Sequence: Synthetic oligonucleotide
aaaccuauacuuauaaguggu

SEQ ID NO: 2614 - RNA, 21 nt, Artificial Sequence
  Description of Artificial Sequence: Synthetic oligonucleotide
augaaucaaacaucaugagcu

SEQ ID NO: 2615 - RNA, 21 nt, Artificial Sequence
  Description of Artificial Sequence: Synthetic oligonucleotide
ccaguggcacuucuguagugu

SEQ ID NO: 2616 - RNA, 21 nt, Artificial Sequence
  Description of Artificial Sequence: Synthetic oligonucleotide
aguggcacuucuguagugugu

SEQ ID NO: 2617 - RNA, 21 nt, Artificial Sequence
  Description of Artificial Sequence: Synthetic oligonucleotide
cugggcacucauucaucuauu

SEQ ID NO: 2618 - RNA, 21 nt, Artificial Sequence
  Description of Artificial Sequence: Synthetic oligonucleotide
uuaacuuccaugaauucuagu

SEQ ID NO: 2619 - RNA, 21 nt, Artificial Sequence
  Description of Artificial Sequence: Synthetic oligonucleotide
ugaugaagacucauaugagau

SEQ ID NO: 2620 - RNA, 21 nt, Artificial Sequence
  Description of Artificial Sequence: Synthetic oligonucleotide
aaacucaucauugaaucaggu

SEQ ID NO: 2621 - RNA, 21 nt, Artificial Sequence
  Description of Artificial Sequence: Synthetic oligonucleotide
aaacacagauauaauuguugu

SEQ ID NO: 2622 - RNA, 21 nt, Artificial Sequence
  Description of Artificial Sequence: Synthetic oligonucleotide
cacagauauaauuguugguuu

SEQ ID NO: 2623 - RNA, 21 nt, Artificial Sequence
  Description of Artificial Sequence: Synthetic oligonucleotide
auucugaagacccuauagagu

SEQ ID NO: 2624 - RNA, 21 nt, Artificial Sequence
  Description of Artificial Sequence: Synthetic oligonucleotide
cgucuacuuucacuuggugcu

SEQ ID NO: 2625 - RNA, 21 nt, Artificial Sequence
  Description of Artificial Sequence: Synthetic oligonucleotide
aauuacuagcacauaaaguuu

SEQ ID NO: 2626 - RNA, 21 nt, Artificial Sequence
  Description of Artificial Sequence: Synthetic oligonucleotide
uacuagcacauaaaguugggu

SEQ ID NO: 2627 - RNA, 21 nt, Artificial Sequence
  Description of Artificial Sequence: Synthetic oligonucleotide
gagauggcauuuggcuucugu

SEQ ID NO: 2628 - RNA, 21 nt, Artificial Sequence
  Description of Artificial Sequence: Synthetic oligonucleotide
aaguuuccuagaguuagacau

SEQ ID NO: 2629 - RNA, 21 nt, Artificial Sequence
  Description of Artificial Sequence: Synthetic oligonucleotide
ccuagaguuagacauaaaucu

SEQ ID NO: 2630 - RNA, 21 nt, Artificial Sequence
  Description of Artificial Sequence: Synthetic oligonucleotide
uacaaguaagacaggauggau

SEQ ID NO: 2631 - RNA, 21 nt, Artificial Sequence
  Description of Artificial Sequence: Synthetic oligonucleotide
aggaccuuucacccucuaagu

SEQ ID NO: 2632 - RNA, 21 nt, Artificial Sequence
  Description of Artificial Sequence: Synthetic oligonucleotide
ugcuucauaaauccaaugaau

SEQ ID NO: 2633 - RNA, 21 nt, Artificial Sequence
  Description of Artificial Sequence: Synthetic oligonucleotide
ccaaugaaacaucucuucccu

SEQ ID NO: 2634 - RNA, 21 nt, Artificial Sequence
  Description of Artificial Sequence: Synthetic oligonucleotide
gaccgaagucacaaguccuuu

SEQ ID NO: 2635 - RNA, 21 nt, Artificial Sequence
  Description of Artificial Sequence: Synthetic oligonucleotide
uucuacccuucugaaucuagu

SEQ ID NO: 2636 - RNA, 21 nt, Artificial Sequence
  Description of Artificial Sequence: Synthetic oligonucleotide
caucuccuacucucaaugauu

SEQ ID NO: 2637 - RNA, 21 nt, Artificial Sequence
  Description of Artificial Sequence: Synthetic oligonucleotide
uuuaauccacugguuauaguu

SEQ ID NO: 2638 - RNA, 21 nt, Artificial Sequence
  Description of Artificial Sequence: Synthetic oligonucleotide
uuaauccacugguuauagugu

SEQ ID NO: 2639 - RNA, 21 nt, Artificial Sequence
  Description of Artificial Sequence: Synthetic oligonucleotide
augguacagauuacauugagu

SEQ ID NO: 2640 - RNA, 21 nt, Artificial Sequence
  Description of Artificial Sequence: Synthetic oligonucleotide
acugauguuaggacaaacauu

SEQ ID NO: 2641 - RNA, 21 nt, Artificial Sequence
  Description of Artificial Sequence: Synthetic oligonucleotide
ugaagacucugaugauauucu

SEQ ID NO: 2642 - RNA, 21 nt, Artificial Sequence
  Description of Artificial Sequence: Synthetic oligonucleotide
guaugaagagcaucucggaau

SEQ ID NO: 2643 - RNA, 21 nt, Artificial Sequence
  Description of Artificial Sequence: Synthetic oligonucleotide
agagcaucucggaauucuugu

SEQ ID NO: 2644 - RNA, 21 nt, Artificial Sequence
  Description of Artificial Sequence: Synthetic oligonucleotide
aauucuugguccuauuaucau

SEQ ID NO: 2645 - RNA, 21 nt, Artificial Sequence
  Description of Artificial Sequence: Synthetic oligonucleotide
ugaaguggaugauguuauccu

SEQ ID NO: 2646 - RNA, 21 nt, Artificial Sequence
  Description of Artificial Sequence: Synthetic oligonucleotide
gaaguggaugauguuauccau

SEQ ID NO: 2647 - RNA, 21 nt, Artificial Sequence
  Description of Artificial Sequence: Synthetic oligonucleotide
aucagagggaaagacuuaugu

SEQ ID NO: 2648 - RNA, 21 nt, Artificial Sequence
  Description of Artificial Sequence: Synthetic oligonucleotide
agccaaauagcaguuauaccu

SEQ ID NO: 2649 - RNA, 21 nt, Artificial Sequence
  Description of Artificial Sequence: Synthetic oligonucleotide
agcaguuauaccuacguaugu

SEQ ID NO: 2650 - RNA, 21 nt, Artificial Sequence
  Description of Artificial Sequence: Synthetic oligonucleotide
gagagaauuugucuuacuauu

SEQ ID NO: 2651 - RNA, 21 nt, Artificial Sequence
  Description of Artificial Sequence: Synthetic oligonucleotide
gaaaagaagagcugguacuau

SEQ ID NO: 2652 - RNA, 21 nt, Artificial Sequence
  Description of Artificial Sequence: Synthetic oligonucleotide
aaagaagagcugguacuaugu

SEQ ID NO: 2653 - RNA, 21 nt, Artificial Sequence
  Description of Artificial Sequence: Synthetic oligonucleotide
agaagagcugguacuaugaau

SEQ ID NO: 2654 - RNA, 21 nt, Artificial Sequence
  Description of Artificial Sequence: Synthetic oligonucleotide
gagcugguacuaugaaaagau

SEQ ID NO: 2655 - RNA, 21 nt, Artificial Sequence
  Description of Artificial Sequence: Synthetic oligonucleotide
gcugguacuaugaaaagaagu

SEQ ID NO: 2656 - RNA, 21 nt, Artificial Sequence
  Description of Artificial Sequence: Synthetic oligonucleotide
uuucacgccauuaaugggauu

SEQ ID NO: 2657 - RNA, 21 nt, Artificial Sequence
  Description of Artificial Sequence: Synthetic oligonucleotide
auuaaugggaugaucuacagu

SEQ ID NO: 2658 - RNA, 21 nt, Artificial Sequence
  Description of Artificial Sequence: Synthetic oligonucleotide
gcucccaagacauucacgugu

SEQ ID NO: 2659 - RNA, 21 nt, Artificial Sequence
  Description of Artificial Sequence: Synthetic oligonucleotide
augcaaacgccauuucuuauu

SEQ ID NO: 2660 - RNA, 21 nt, Artificial Sequence
  Description of Artificial Sequence: Synthetic oligonucleotide
gcaaacgccauuucuuaucau

SEQ ID NO: 2661 - RNA, 21 nt, Artificial Sequence
  Description of Artificial Sequence: Synthetic oligonucleotide
uaagcacugguaucauaucuu

SEQ ID NO: 2662 - RNA, 21 nt, Artificial Sequence
  Description of Artificial Sequence: Synthetic oligonucleotide
aaacaaugguggaucuuauau

SEQ ID NO: 2663 - RNA, 21 nt, Artificial Sequence
  Description of Artificial Sequence: Synthetic oligonucleotide
caaugguggaucuuauaaugu

SEQ ID NO: 2664 - RNA, 21 nt, Artificial Sequence
  Description of Artificial Sequence: Synthetic oligonucleotide
gguggaucuuauaaugcuugu

SEQ ID NO: 2665 - RNA, 21 nt, Artificial Sequence
  Description of Artificial Sequence: Synthetic oligonucleotide
aucuuauaaugcuuggagugu

SEQ ID NO: 2666 - RNA, 21 nt, Artificial Sequence
  Description of Artificial Sequence: Synthetic oligonucleotide
uauaccacagaguucuauguu

SEQ ID NO: 2667 - RNA, 21 nt, Artificial Sequence
  Description of Artificial Sequence: Synthetic oligonucleotide
uaccacagaguucuauguagu

SEQ ID NO: 2668 - RNA, 21 nt, Artificial Sequence
  Description of Artificial Sequence: Synthetic oligonucleotide
cacagaguucuauguagcuuu

SEQ ID NO: 2669 - RNA, 21 nt, Artificial Sequence
  Description of Artificial Sequence: Synthetic oligonucleotide
aguucuauguagcuuacaguu

SEQ ID NO: 2670 - RNA, 21 nt, Artificial Sequence
  Description of Artificial Sequence: Synthetic oligonucleotide
ucaguuugacccaccuauugu

SEQ ID NO: 2671 - RNA, 21 nt, Artificial Sequence
  Description of Artificial Sequence: Synthetic oligonucleotide
caguuugacccaccuauuguu

SEQ ID NO: 2672 - RNA, 21 nt, Artificial Sequence
  Description of Artificial Sequence: Synthetic oligonucleotide
cuauuguggcuagauauauuu

SEQ ID NO: 2673 - RNA, 21 nt, Artificial Sequence
  Description of Artificial Sequence: Synthetic oligonucleotide
agcaaaucacagcuucuucgu

SEQ ID NO: 2674 - RNA, 21 nt, Artificial Sequence
  Description of Artificial Sequence: Synthetic oligonucleotide
aaauugaucuacucaagaucu

SEQ ID NO: 2675 - RNA, 21 nt, Artificial Sequence
  Description of Artificial Sequence: Synthetic oligonucleotide
uccaugguggacaagauuuuu

SEQ ID NO: 2676 - RNA, 21 nt, Artificial Sequence
  Description of Artificial Sequence: Synthetic oligonucleotide
ccaugguggacaagauuuuuu

SEQ ID NO: 2677 - RNA, 21 nt, Artificial Sequence
  Description of Artificial Sequence: Synthetic oligonucleotide
caugguggacaagauuuuugu

SEQ ID NO: 2678 - RNA, 21 nt, Artificial Sequence
  Description of Artificial Sequence: Synthetic oligonucleotide
augguggacaagauuuuugau

SEQ ID NO: 2679 - RNA, 21 nt, Artificial Sequence
  Description of Artificial Sequence: Synthetic oligonucleotide
ugguggacaagauuuuugaau

SEQ ID NO: 2680 - RNA, 21 nt, Artificial Sequence
  Description of Artificial Sequence: Synthetic oligonucleotide
gguggacaagauuuuugaagu

SEQ ID NO: 2681 - RNA, 21 nt, Artificial Sequence
  Description of Artificial Sequence: Synthetic oligonucleotide
guggacaagauuuuugaaggu

SEQ ID NO: 2682 - RNA, 21 nt, Artificial Sequence
  Description of Artificial Sequence: Synthetic oligonucleotide
agauuuuugaaggaaauacuu

SEQ ID NO: 2683 - RNA, 21 nt, Artificial Sequence
  Description of Artificial Sequence: Synthetic oligonucleotide
gauuuuugaaggaaauacuau

SEQ ID NO: 2684 - RNA, 21 nt, Artificial Sequence
  Description of Artificial Sequence: Synthetic oligonucleotide
uuugaaggaaauacuaauacu

SEQ ID NO: 2685 - RNA, 21 nt, Artificial Sequence
  Description of Artificial Sequence: Synthetic oligonucleotide
uugaaggaaauacuaauaccu

SEQ ID NO: 2686 - RNA, 21 nt, Artificial Sequence
  Description of Artificial Sequence: Synthetic oligonucleotide
cuaauaccaaaggacaugugu

SEQ ID NO: 2687 - RNA, 21 nt, Artificial Sequence
  Description of Artificial Sequence: Synthetic oligonucleotide
uaauaccaaaggacaugugau

SEQ ID NO: 2688 - RNA, 21 nt, Artificial Sequence
  Description of Artificial Sequence: Synthetic oligonucleotide
caaucauuuccagguuuaucu

SEQ ID NO: 2689 - RNA, 21 nt, Artificial Sequence
  Description of Artificial Sequence: Synthetic oligonucleotide
aucauuuccagguuuauccgu

SEQ ID NO: 2690 - DNA, 23 bp, Artificial Sequence
  Description of Artificial Sequence: Synthetic oligonucleotide
  Description of Combined DNA/RNA Molecule: Synthetic oligonucleotide
aacgtagaacugccuuagcugug

SEQ ID NO: 2691 - DNA, 23 bp, Artificial Sequence
  Description of Artificial Sequence: Synthetic oligonucleotide
  Description of Combined DNA/RNA Molecule: Synthetic oligonucleotide
aauataaaguaggcccaagaagu

SEQ ID NO: 2692 - DNA, 23 bp, Artificial Sequence
  Description of Artificial Sequence: Synthetic oligonucleotide
  Description of Combined DNA/RNA Molecule: Synthetic oligonucleotide
acgacutcagcauauaaaguagg

SEQ ID NO: 2693 - DNA, 23 bp, Artificial Sequence
  Description of Artificial Sequence: Synthetic oligonucleotide
  Description of Combined DNA/RNA Molecule: Synthetic oligonucleotide
accgactucagcauauaaaguag

SEQ ID NO: 2694 - DNA, 23 bp, Artificial Sequence
  Description of Artificial Sequence: Synthetic oligonucleotide
  Description of Combined DNA/RNA Molecule: Synthetic oligonucleotide
agcacctucugauaauuuacugu

SEQ ID NO: 2695 - RNA, 23 nt, Artificial Sequence
  Description of Artificial Sequence: Synthetic oligonucleotide
agguaagaagcaccuucugauaa

SEQ ID NO: 2696 - DNA, 23 bp, Artificial Sequence
  Description of Artificial Sequence: Synthetic oligonucleotide
  Description of Combined DNA/RNA Molecule: Synthetic oligonucleotide
aaggtaagaagcaccuucugaua

SEQ ID NO: 2697 - RNA, 23 nt, Artificial Sequence
  Description of Artificial Sequence: Synthetic oligonucleotide
aaagguaagaagcaccuucugau

SEQ ID NO: 2698 - RNA, 23 nt, Artificial Sequence
  Description of Artificial Sequence: Synthetic oligonucleotide
acugauacuccauucauaggugu

SEQ ID NO: 2699 - DNA, 23 bp, Artificial Sequence
  Description of Artificial Sequence: Synthetic oligonucleotide
  Description of Combined DNA/RNA Molecule: Synthetic oligonucleotide
aacugatacuccauucauaggug

SEQ ID NO: 2700 - DNA, 23 bp, Artificial Sequence
  Description of Artificial Sequence: Synthetic oligonucleotide
  Description of Combined DNA/RNA Molecule: Synthetic oligonucleotide
acucactgauacuccauucauag

SEQ ID NO: 2701 - DNA, 23 bp, Artificial Sequence
  Description of Artificial Sequence: Synthetic oligonucleotide
  Description of Combined DNA/RNA Molecule: Synthetic oligonucleotide
aaauagaugugtgugaggcaugg

SEQ ID NO: 2702 - DNA, 23 bp, Artificial Sequence
  Description of Artificial Sequence: Synthetic oligonucleotide
  Description of Combined DNA/RNA Molecule: Synthetic oligonucleotide
ataatagaugugugugaggcaug

SEQ ID NO: 2703 - DNA, 23 bp, Artificial Sequence
  Description of Artificial Sequence: Synthetic oligonucleotide
  Description of Combined DNA/RNA Molecule: Synthetic oligonucleotide
aguaauagaugtgugugaggcau

SEQ ID NO: 2704 - DNA, 23 bp, Artificial Sequence
  Description of Artificial Sequence: Synthetic oligonucleotide
  Description of Combined DNA/RNA Molecule: Synthetic oligonucleotide
aaguaatagaugugugugaggca

SEQ ID NO: 2705 - DNA, 23 bp, Artificial Sequence
  Description of Artificial Sequence: Synthetic oligonucleotide
  Description of Combined DNA/RNA Molecule: Synthetic oligonucleotide
agagtaauagatgugugugaggc

SEQ ID NO: 2706 - DNA, 23 bp, Artificial Sequence
  Description of Artificial Sequence: Synthetic oligonucleotide
  Description of Combined DNA/RNA Molecule: Synthetic oligonucleotide
acgatutgcuugucaaacgucuu

SEQ ID NO: 2707 - DNA, 23 bp, Artificial Sequence
  Description of Artificial Sequence: Synthetic oligonucleotide
  Description of Combined DNA/RNA Molecule: Synthetic oligonucleotide
acautagggaugaugacuggcuc

SEQ ID NO: 2708 - DNA, 23 bp, Artificial Sequence
  Description of Artificial Sequence: Synthetic oligonucleotide
  Description of Combined DNA/RNA Molecule: Synthetic oligonucleotide
aauccatugactguguacauuag

SEQ ID NO: 2709 - DNA, 23 bp, Artificial Sequence
  Description of Artificial Sequence: Synthetic oligonucleotide
  Description of Combined DNA/RNA Molecule: Synthetic oligonucleotide
acacaaacugutauaucuggcau

SEQ ID NO: 2710 - DNA, 23 bp, Artificial Sequence
  Description of Artificial Sequence: Synthetic oligonucleotide
  Description of Combined DNA/RNA Molecule: Synthetic oligonucleotide
agcacaaacugtuauaucuggca

SEQ ID NO: 2711 - DNA, 23 bp, Artificial Sequence
  Description of Artificial Sequence: Synthetic oligonucleotide
  Description of Combined DNA/RNA Molecule: Synthetic oligonucleotide
aacctuaugaugguucugcucca

SEQ ID NO: 2712 - DNA, 23 bp, Artificial Sequence
  Description of Artificial Sequence: Synthetic oligonucleotide
  Description of Combined DNA/RNA Molecule: Synthetic oligonucleotide
acauautugcgguaguggaugua

SEQ ID NO: 2713 - DNA, 23 bp, Artificial Sequence
  Description of Artificial Sequence: Synthetic oligonucleotide
  Description of Combined DNA/RNA Molecule: Synthetic oligonucleotide
aaugtaagccugcaucccagcuu

SEQ ID NO: 2714 - DNA, 23 bp, Artificial Sequence
  Description of Artificial Sequence: Synthetic oligonucleotide
  Description of Combined DNA/RNA Molecule: Synthetic oligonucleotide
aaauguaagcctgcaucccagcu

SEQ ID NO: 2715 - DNA, 23 bp, Artificial Sequence
  Description of Artificial Sequence: Synthetic oligonucleotide
  Description of Combined DNA/RNA Molecule: Synthetic oligonucleotide
acaatgtaagccugcaucccagc

SEQ ID NO: 2716 - DNA, 23 bp, Artificial Sequence
  Description of Artificial Sequence: Synthetic oligonucleotide
  Description of Combined DNA/RNA Molecule: Synthetic oligonucleotide
agucaatguaagccugcauccca

SEQ ID NO: 2717 - DNA, 23 bp, Artificial Sequence
  Description of Artificial Sequence: Synthetic oligonucleotide
  Description of Combined DNA/RNA Molecule: Synthetic oligonucleotide
aaugtcaauguaagccugcaucc

SEQ ID NO: 2718 - DNA, 23 bp, Artificial Sequence
  Description of Artificial Sequence: Synthetic oligonucleotide
  Description of Combined DNA/RNA Molecule: Synthetic oligonucleotide
atuuaatgucaauguaagccugc

SEQ ID NO: 2719 - DNA, 23 bp, Artificial Sequence
  Description of Artificial Sequence: Synthetic oligonucleotide
  Description of Combined DNA/RNA Molecule: Synthetic oligonucleotide
atuutaaugucaauguaagccug

SEQ ID NO: 2720 - DNA, 23 bp, Artificial Sequence
  Description of Artificial Sequence: Synthetic oligonucleotide
  Description of Combined DNA/RNA Molecule: Synthetic oligonucleotide
atuutuaaugucaauguaagccu

SEQ ID NO: 2721 - DNA, 23 bp, Artificial Sequence
  Description of Artificial Sequence: Synthetic oligonucleotide
  Description of Combined DNA/RNA Molecule: Synthetic oligonucleotide
aguututaaugtcaauguaagcc

SEQ ID NO: 2722 - DNA, 23 bp, Artificial Sequence
  Description of Artificial Sequence: Synthetic oligonucleotide
  Description of Combined DNA/RNA Molecule: Synthetic oligonucleotide
aagututuaaugucaauguaagc

SEQ ID NO: 2723 - DNA, 23 bp, Artificial Sequence
  Description of Artificial Sequence: Synthetic oligonucleotide
  Description of Combined DNA/RNA Molecule: Synthetic oligonucleotide
acagtutuuaatgucaauguaag

SEQ ID NO: 2724 - DNA, 23 bp, Artificial Sequence
  Description of Artificial Sequence: Synthetic oligonucleotide
  Description of Combined DNA/RNA Molecule: Synthetic oligonucleotide
agcagutuuuaaugucaauguaa

SEQ ID NO: 2725 - RNA, 23 nt, Artificial Sequence
  Description of Artificial Sequence: Synthetic oligonucleotide
aauucgcugguauuacaggugca

SEQ ID NO: 2726 - DNA, 23 bp, Artificial Sequence
  Description of Artificial Sequence: Synthetic oligonucleotide
  Description of Combined DNA/RNA Molecule: Synthetic oligonucleotide
accatatucgctgguauuacagg

SEQ ID NO: 2727 - DNA, 23 bp, Artificial Sequence
  Description of Artificial Sequence: Synthetic oligonucleotide
  Description of Combined DNA/RNA Molecule: Synthetic oligonucleotide
atccauauucgcugguauuacag

SEQ ID NO: 2728 - DNA, 23 bp, Artificial Sequence
  Description of Artificial Sequence: Synthetic oligonucleotide
  Description of Combined DNA/RNA Molecule: Synthetic oligonucleotide
atcgtacugugtguacauaacuu

SEQ ID NO: 2729 - DNA, 23 bp, Artificial Sequence
  Description of Artificial Sequence: Synthetic oligonucleotide
  Description of Combined DNA/RNA Molecule: Synthetic oligonucleotide
atucguacuguguguacauaacu

SEQ ID NO: 2730 - DNA, 23 bp, Artificial Sequence
  Description of Artificial Sequence: Synthetic oligonucleotide
  Description of Combined DNA/RNA Molecule: Synthetic oligonucleotide
acaucutcguacuguguguacau

SEQ ID NO: 2731 - DNA, 23 bp, Artificial Sequence
  Description of Artificial Sequence: Synthetic oligonucleotide
  Description of Combined DNA/RNA Molecule: Synthetic oligonucleotide
accacutauaaguauagguuucc

SEQ ID NO: 2732 - DNA, 23 bp, Artificial Sequence
  Description of Artificial Sequence: Synthetic oligonucleotide
  Description of Combined DNA/RNA Molecule: Synthetic oligonucleotide
agcucatgaugtuugauucauaa

SEQ ID NO: 2733 - DNA, 23 bp, Artificial Sequence
  Description of Artificial Sequence: Synthetic oligonucleotide
  Description of Combined DNA/RNA Molecule: Synthetic oligonucleotide
acactacagaagugccacuggac

SEQ ID NO: 2734 - DNA, 23 bp, Artificial Sequence
  Description of Artificial Sequence: Synthetic oligonucleotide
  Description of Combined DNA/RNA Molecule: Synthetic oligonucleotide
acacactacagaagugccacugg

SEQ ID NO: 2735 - DNA, 23 bp, Artificial Sequence
  Description of Artificial Sequence: Synthetic oligonucleotide
  Description of Combined DNA/RNA Molecule: Synthetic oligonucleotide
aauagatgaaugagugcccagug

SEQ ID NO: 2736 - DNA, 23 bp, Artificial Sequence
  Description of Artificial Sequence: Synthetic oligonucleotide
  Description of Combined DNA/RNA Molecule: Synthetic oligonucleotide
acuagaauucatggaaguuaaca

SEQ ID NO: 2737 - DNA, 23 bp, Artificial Sequence
  Description of Artificial Sequence: Synthetic oligonucleotide
  Description of Combined DNA/RNA Molecule: Synthetic oligonucleotide
atcucataugagucuucaucauc

SEQ ID NO: 2738 - DNA, 23 bp, Artificial Sequence
  Description of Artificial Sequence: Synthetic oligonucleotide
  Description of Combined DNA/RNA Molecule: Synthetic oligonucleotide
accugatucaatgaugaguuucg

SEQ ID NO: 2739 - RNA, 23 nt, Artificial Sequence
  Description of Artificial Sequence: Synthetic oligonucleotide
acaacaauuauaucuguguuuga

SEQ ID NO: 2740 - DNA, 23 bp, Artificial Sequence
  Description of Artificial Sequence: Synthetic oligonucleotide
  Description of Combined DNA/RNA Molecule: Synthetic oligonucleotide
aaaccaacaautauaucuguguu

SEQ ID NO: 2741 - DNA, 23 bp, Artificial Sequence
  Description of Artificial Sequence: Synthetic oligonucleotide
  Description of Combined DNA/RNA Molecule: Synthetic oligonucleotide
acuctatagggtcuucagaauau

SEQ ID NO: 2742 - RNA, 23 nt, Artificial Sequence
  Description of Artificial Sequence: Synthetic oligonucleotide
agcaccaagugaaaguagacgua

SEQ ID NO: 2743 - DNA, 23 bp, Artificial Sequence
  Description of Artificial Sequence: Synthetic oligonucleotide
  Description of Combined DNA/RNA Molecule: Synthetic oligonucleotide
aaactutaugugcuaguaauuuc

SEQ ID NO: 2744 - DNA, 23 bp, Artificial Sequence
  Description of Artificial Sequence: Synthetic oligonucleotide
  Description of Combined DNA/RNA Molecule: Synthetic oligonucleotide
acccaacuuuatgugcuaguaau

SEQ ID NO: 2745 - RNA, 23 nt, Artificial Sequence
  Description of Artificial Sequence: Synthetic oligonucleotide
acagaagccaaaugccaucuccc

SEQ ID NO: 2746 - DNA, 23 bp, Artificial Sequence
  Description of Artificial Sequence: Synthetic oligonucleotide
  Description of Combined DNA/RNA Molecule: Synthetic oligonucleotide
atgucuaacuctaggaaacuuug

SEQ ID NO: 2747 - DNA, 23 bp, Artificial Sequence
  Description of Artificial Sequence: Synthetic oligonucleotide
  Description of Combined DNA/RNA Molecule: Synthetic oligonucleotide
agautuauguctaacucuaggaa

SEQ ID NO: 2748 - DNA, 23 bp, Artificial Sequence
  Description of Artificial Sequence: Synthetic oligonucleotide
  Description of Combined DNA/RNA Molecule: Synthetic oligonucleotide
atccauccugucuuacuuguaga

SEQ ID NO: 2749 - RNA, 23 nt, Artificial Sequence
  Description of Artificial Sequence: Synthetic oligonucleotide
acuuagagggugaaagguccucg

SEQ ID NO: 2750 - DNA, 23 bp, Artificial Sequence
  Description of Artificial Sequence: Synthetic oligonucleotide
  Description of Combined DNA/RNA Molecule: Synthetic oligonucleotide
atucautggautuaugaagcacc

SEQ ID NO: 2751 - RNA, 23 nt, Artificial Sequence
  Description of Artificial Sequence: Synthetic oligonucleotide
agggaagagauguuucauuggau

SEQ ID NO: 2752 - RNA, 23 nt, Artificial Sequence
  Description of Artificial Sequence: Synthetic oligonucleotide
aaaggacuugugacuucggucau

SEQ ID NO: 2753 - DNA, 23 bp, Artificial Sequence
  Description of Artificial Sequence: Synthetic oligonucleotide
  Description of Combined DNA/RNA Molecule: Synthetic oligonucleotide
acuagatucagaaggguagaaua

SEQ ID NO: 2754 - DNA, 23 bp, Artificial Sequence
  Description of Artificial Sequence: Synthetic oligonucleotide
  Description of Combined DNA/RNA Molecule: Synthetic oligonucleotide
aaucautgagaguaggagaugaa

SEQ ID NO: 2755 - RNA, 23 nt, Artificial Sequence
  Description of Artificial Sequence: Synthetic oligonucleotide
aacuauaaccaguggauuaaauu

SEQ ID NO: 2756 - DNA, 23 bp, Artificial Sequence
  Description of Artificial Sequence: Synthetic oligonucleotide
  Description of Combined DNA/RNA Molecule: Synthetic oligonucleotide
acactataaccaguggauuaaau

SEQ ID NO: 2757 - DNA, 23 bp, Artificial Sequence
  Description of Artificial Sequence: Synthetic oligonucleotide
  Description of Combined DNA/RNA Molecule: Synthetic oligonucleotide
acucaatguaatcuguaccaucu

SEQ ID NO: 2758 - DNA, 23 bp, Artificial Sequence
  Description of Artificial Sequence: Synthetic oligonucleotide
  Description of Combined DNA/RNA Molecule: Synthetic oligonucleotide
aaugtutgucctaacaucaguuu

SEQ ID NO: 2759 - DNA, 23 bp, Artificial Sequence
  Description of Artificial Sequence: Synthetic oligonucleotide
  Description of Combined DNA/RNA Molecule: Synthetic oligonucleotide
agaatatcaucagagucuucaau

SEQ ID NO: 2760 - DNA, 23 bp, Artificial Sequence
  Description of Artificial Sequence: Synthetic oligonucleotide
  Description of Combined DNA/RNA Molecule: Synthetic oligonucleotide
atuccgagaugcucuucauacuc

SEQ ID NO: 2761 - RNA, 23 nt, Artificial Sequence
  Description of Artificial Sequence: Synthetic oligonucleotide
acaagaauuccgagaugcucuuc

SEQ ID NO: 2762 - DNA, 23 bp, Artificial Sequence
  Description of Artificial Sequence: Synthetic oligonucleotide
  Description of Combined DNA/RNA Molecule: Synthetic oligonucleotide
atgataauaggaccaagaauucc

SEQ ID NO: 2763 - DNA, 23 bp, Artificial Sequence
  Description of Artificial Sequence: Synthetic oligonucleotide
  Description of Combined DNA/RNA Molecule: Synthetic oligonucleotide
aggataacaucauccacuucagc

SEQ ID NO: 2764 - DNA, 23 bp, Artificial Sequence
  Description of Artificial Sequence: Synthetic oligonucleotide
  Description of Combined DNA/RNA Molecule: Synthetic oligonucleotide
atggauaacaucauccacuucag

SEQ ID NO: 2765 - DNA, 23 bp, Artificial Sequence
  Description of Artificial Sequence: Synthetic oligonucleotide
  Description of Combined DNA/RNA Molecule: Synthetic oligonucleotide
acauaagucuutcccucugauga

SEQ ID NO: 2766 - RNA, 23 nt, Artificial Sequence
  Description of Artificial Sequence: Synthetic oligonucleotide
agguauaacugcuauuuggcuga

SEQ ID NO: 2767 - DNA, 23 bp, Artificial Sequence
  Description of Artificial Sequence: Synthetic oligonucleotide
  Description of Combined DNA/RNA Molecule: Synthetic oligonucleotide
acauacguaggtauaacugcuau

SEQ ID NO: 2768 - RNA, 23 nt, Artificial Sequence
  Description of Artificial Sequence: Synthetic oligonucleotide
aauaguaagacaaauucucucau

SEQ ID NO: 2769 - DNA, 23 bp, Artificial Sequence
  Description of Artificial Sequence: Synthetic oligonucleotide
  Description of Combined DNA/RNA Molecule: Synthetic oligonucleotide
atagtaccagctcuucuuuucau

SEQ ID NO: 2770 - DNA, 23 bp, Artificial Sequence
  Description of Artificial Sequence: Synthetic oligonucleotide
  Description of Combined DNA/RNA Molecule: Synthetic oligonucleotide
acauagtaccagcucuucuuuuc

SEQ ID NO: 2771 - DNA, 23 bp, Artificial Sequence
  Description of Artificial Sequence: Synthetic oligonucleotide
  Description of Combined DNA/RNA Molecule: Synthetic oligonucleotide
atucauaguaccagcucuucuuu

SEQ ID NO: 2772 - DNA, 23 bp, Artificial Sequence
  Description of Artificial Sequence: Synthetic oligonucleotide
  Description of Combined DNA/RNA Molecule: Synthetic oligonucleotide
atcututcauaguaccagcucuu

SEQ ID NO: 2773 - DNA, 23 bp, Artificial Sequence
  Description of Artificial Sequence: Synthetic oligonucleotide
  Description of Combined DNA/RNA Molecule: Synthetic oligonucleotide
acuucutuucataguaccagcuc

SEQ ID NO: 2774 - DNA, 23 bp, Artificial Sequence
  Description of Artificial Sequence: Synthetic oligonucleotide
  Description of Combined DNA/RNA Molecule: Synthetic oligonucleotide
aaucccauuaatggcgugaaacu

SEQ ID NO: 2775 - DNA, 23 bp, Artificial Sequence
  Description of Artificial Sequence: Synthetic oligonucleotide
  Description of Combined DNA/RNA Molecule: Synthetic oligonucleotide
acugtagaucatcccauuaaugg

SEQ ID NO: 2776 - DNA, 23 bp, Artificial Sequence
  Description of Artificial Sequence: Synthetic oligonucleotide
  Description of Combined DNA/RNA Molecule: Synthetic oligonucleotide
acacgugaaugtcuugggagccg

SEQ ID NO: 2777 - RNA, 23 nt, Artificial Sequence
  Description of Artificial Sequence: Synthetic oligonucleotide
aauaagaaauggcguuugcaucc

SEQ ID NO: 2778 - DNA, 23 bp, Artificial Sequence
  Description of Artificial Sequence: Synthetic oligonucleotide
  Description of Combined DNA/RNA Molecule: Synthetic oligonucleotide
atgataagaaatggcguuugcau

SEQ ID NO: 2779 - DNA, 23 bp, Artificial Sequence
  Description of Artificial Sequence: Synthetic oligonucleotide
  Description of Combined DNA/RNA Molecule: Synthetic oligonucleotide
aagatatgauaccagugcuuagu

SEQ ID NO: 2780 - DNA, 23 bp, Artificial Sequence
  Description of Artificial Sequence: Synthetic oligonucleotide
  Description of Combined DNA/RNA Molecule: Synthetic oligonucleotide
atauaagauccaccauuguuuaa

SEQ ID NO: 2781 - DNA, 23 bp, Artificial Sequence
  Description of Artificial Sequence: Synthetic oligonucleotide
  Description of Combined DNA/RNA Molecule: Synthetic oligonucleotide
acautataagatccaccauuguu

SEQ ID NO: 2782 - RNA, 23 nt, Artificial Sequence
  Description of Artificial Sequence: Synthetic oligonucleotide
acaagcauuauaagauccaccau

SEQ ID NO: 2783 - DNA, 23 bp, Artificial Sequence
  Description of Artificial Sequence: Synthetic oligonucleotide
  Description of Combined DNA/RNA Molecule: Synthetic oligonucleotide
acactccaagcauuauaagaucc

SEQ ID NO: 2784 - DNA, 23 bp, Artificial Sequence
  Description of Artificial Sequence: Synthetic oligonucleotide
  Description of Combined DNA/RNA Molecule: Synthetic oligonucleotide
aacatagaacucugugguauagc

SEQ ID NO: 2785 - DNA, 23 bp, Artificial Sequence
  Description of Artificial Sequence: Synthetic oligonucleotide
  Description of Combined DNA/RNA Molecule: Synthetic oligonucleotide
acuacatagaacucugugguaua

SEQ ID NO: 2786 - RNA, 23 nt, Artificial Sequence
  Description of Artificial Sequence: Synthetic oligonucleotide
aaagcuacauagaacucuguggu

SEQ ID NO: 2787 - RNA, 23 nt, Artificial Sequence
  Description of Artificial Sequence: Synthetic oligonucleotide
aacuguaagcuacauagaacucu

SEQ ID NO: 2788 - DNA, 23 bp, Artificial Sequence
  Description of Artificial Sequence: Synthetic oligonucleotide
  Description of Combined DNA/RNA Molecule: Synthetic oligonucleotide
acaataggugggucaaacugauu

SEQ ID NO: 2789 - RNA, 23 nt, Artificial Sequence
  Description of Artificial Sequence: Synthetic oligonucleotide
aacaauaggugggucaaacugau

SEQ ID NO: 2790 - RNA, 23 nt, Artificial Sequence
  Description of Artificial Sequence: Synthetic oligonucleotide
aaauauaucuagccacaauaggu

SEQ ID NO: 2791 - RNA, 23 nt, Artificial Sequence
  Description of Artificial Sequence: Synthetic oligonucleotide
acgaagaagcugugauuugcuug

SEQ ID NO: 2792 - DNA, 23 bp, Artificial Sequence
  Description of Artificial Sequence: Synthetic oligonucleotide
  Description of Combined DNA/RNA Molecule: Synthetic oligonucleotide
agaucutgaguagaucaauuucu

SEQ ID NO: 2793 - RNA, 23 nt, Artificial Sequence
  Description of Artificial Sequence: Synthetic oligonucleotide
aaaaaucuuguccaccauggagg

SEQ ID NO: 2794 - DNA, 23 bp, Artificial Sequence
  Description of Artificial Sequence: Synthetic oligonucleotide
  Description of Combined DNA/RNA Molecule: Synthetic oligonucleotide
aaaaaatcuugtccaccauggag

SEQ ID NO: 2795 - RNA, 23 nt, Artificial Sequence
  Description of Artificial Sequence: Synthetic oligonucleotide
acaaaaaucuuguccaccaugga

SEQ ID NO: 2796 - DNA, 23 bp, Artificial Sequence
  Description of Artificial Sequence: Synthetic oligonucleotide
  Description of Combined DNA/RNA Molecule: Synthetic oligonucleotide
atcaaaaaucutguccaccaugg

SEQ ID NO: 2797 - DNA, 23 bp, Artificial Sequence
  Description of Artificial Sequence: Synthetic oligonucleotide
  Description of Combined DNA/RNA Molecule: Synthetic oligonucleotide
atucaaaaauctuguccaccaug

SEQ ID NO: 2798 - RNA, 23 nt, Artificial Sequence
  Description of Artificial Sequence: Synthetic oligonucleotide
acuucaaaaaucuuguccaccau

SEQ ID NO: 2799 - DNA, 23 bp, Artificial Sequence
  Description of Artificial Sequence: Synthetic oligonucleotide
  Description of Combined DNA/RNA Molecule: Synthetic oligonucleotide
accutcaaaaatcuuguccacca

SEQ ID NO: 2800 - DNA, 23 bp, Artificial Sequence
  Description of Artificial Sequence: Synthetic oligonucleotide
  Description of Combined DNA/RNA Molecule: Synthetic oligonucleotide
aaguautuccutcaaaaaucuug

SEQ ID NO: 2801 - DNA, 23 bp, Artificial Sequence
  Description of Artificial Sequence: Synthetic oligonucleotide
  Description of Combined DNA/RNA Molecule: Synthetic oligonucleotide
atagtatuucctucaaaaaucuu

SEQ ID NO: 2802 - DNA, 23 bp, Artificial Sequence
  Description of Artificial Sequence: Synthetic oligonucleotide
  Description of Combined DNA/RNA Molecule: Synthetic oligonucleotide
aguatuaguautuccuucaaaaa

SEQ ID NO: 2803 - DNA, 23 bp, Artificial Sequence
  Description of Artificial Sequence: Synthetic oligonucleotide
  Description of Combined DNA/RNA Molecule: Synthetic oligonucleotide
agguautaguatuuccuucaaaa

SEQ ID NO: 2804 - DNA, 23 bp, Artificial Sequence
  Description of Artificial Sequence: Synthetic oligonucleotide
  Description of Combined DNA/RNA Molecule: Synthetic oligonucleotide
acacauguccutugguauuagua

SEQ ID NO: 2805 - DNA, 23 bp, Artificial Sequence
  Description of Artificial Sequence: Synthetic oligonucleotide
  Description of Combined DNA/RNA Molecule: Synthetic oligonucleotide
atcacatgucctuugguauuagu

SEQ ID NO: 2806 - RNA, 23 nt, Artificial Sequence
  Description of Artificial Sequence: Synthetic oligonucleotide
agauaaaccuggaaaugauuggg

SEQ ID NO: 2807 - DNA, 23 bp, Artificial Sequence
  Description of Artificial Sequence: Synthetic oligonucleotide
  Description of Combined DNA/RNA Molecule: Synthetic oligonucleotide
acggauaaacctggaaaugauug

SEQ ID NO: 2808 - RNA, 21 nt, Artificial Sequence
  Description of Artificial Sequence: Synthetic oligonucleotide
cagguccucacuuuaauccua

SEQ ID NO: 2809 - RNA, 21 nt, Artificial Sequence
  Description of Artificial Sequence: Synthetic oligonucleotide
cagguccucacuuuaauccua

SEQ ID NO: 2810 - RNA, 21 nt, Artificial Sequence
  Description of Artificial Sequence: Synthetic oligonucleotide
cacuuuaauccucuauccaga

SEQ ID NO: 2811 - DNA, 23 bp, Artificial Sequence
  Description of Artificial Sequence: Synthetic oligonucleotide
  Description of Combined DNA/RNA Molecule: Synthetic oligonucleotide
uaggautaaagtgaggaccugcg

SEQ ID NO: 2812 - DNA, 23 bp, Artificial Sequence
  Description of Artificial Sequence: Synthetic oligonucleotide
  Description of Combined DNA/RNA Molecule: Synthetic oligonucleotide
ucuggatagaggatuaaagugag

SEQ ID NO: 2813 - DNA, 23 bp, Artificial Sequence
  Description of Artificial Sequence: Synthetic oligonucleotide
  Description of Combined DNA/RNA Molecule: Synthetic oligonucleotide
uaggautaaagtgaggaccugcg

SEQ ID NO: 2814 - DNA, 23 bp, Artificial Sequence
  Description of Artificial Sequence: Synthetic oligonucleotide
  Description of Combined DNA/RNA Molecule: Synthetic oligonucleotide
ucuggatagaggauuaaagugag

SEQ ID NO: 2815 - RNA, 21 nt, Artificial Sequence
  Description of Artificial Sequence: Synthetic oligonucleotide
aauguucacaauuaagcuccu

SEQ ID NO: 2816 - RNA, 21 nt, Artificial Sequence
  Description of Artificial Sequence: Synthetic oligonucleotide
auuugcuauguuagacgaugu

SEQ ID NO: 2817 - RNA, 21 nt, Artificial Sequence
  Description of Artificial Sequence: Synthetic oligonucleotide
uugcuauguuagacgauguaa

SEQ ID NO: 2818 - RNA, 21 nt, Artificial Sequence
  Description of Artificial Sequence: Synthetic oligonucleotide
ugcuauguuagacgauguaaa

SEQ ID NO: 2819 - RNA, 21 nt, Artificial Sequence
  Description of Artificial Sequence: Synthetic oligonucleotide
aacugagaagaacuacauaua

SEQ ID NO: 2820 - RNA, 21 nt, Artificial Sequence
  Description of Artificial Sequence: Synthetic oligonucleotide
aaccaacagcauagucaaaua

SEQ ID NO: 2821 - RNA, 21 nt, Artificial Sequence
  Description of Artificial Sequence: Synthetic oligonucleotide
cccacagaaauuucucuaucu

SEQ ID NO: 2822 - RNA, 21 nt, Artificial Sequence
  Description of Artificial Sequence: Synthetic oligonucleotide
cagguaguccauggacauuaa

SEQ ID NO: 2823 - RNA, 21 nt, Artificial Sequence
  Description of Artificial Sequence: Synthetic oligonucleotide
gguaguccauggacauuaauu

SEQ ID NO: 2824 - RNA, 21 nt, Artificial Sequence
  Description of Artificial Sequence: Synthetic oligonucleotide
aguuggaagacuggaaagaca

SEQ ID NO: 2825 - RNA, 21 nt, Artificial Sequence
  Description of Artificial Sequence: Synthetic oligonucleotide
uggaaagacaacaaacauuau

SEQ ID NO: 2826 - RNA, 21 nt, Artificial Sequence
  Description of Artificial Sequence: Synthetic oligonucleotide
uuuacuugggaaaucacgaaa

SEQ ID NO: 2827 - RNA, 21 nt, Artificial Sequence
  Description of Artificial Sequence: Synthetic oligonucleotide
gggaaaucacgaaaccaacua

SEQ ID NO: 2828 - RNA, 21 nt, Artificial Sequence
  Description of Artificial Sequence: Synthetic oligonucleotide
gaaaucacgaaaccaacuaua

SEQ ID NO: 2829 - RNA, 21 nt, Artificial Sequence
  Description of Artificial Sequence: Synthetic oligonucleotide
cgaaaccaacuauacgcuaca

SEQ ID NO: 2830 - RNA, 21 nt, Artificial Sequence
  Description of Artificial Sequence: Synthetic oligonucleotide
aucaaccaaaauguugaucca

SEQ ID NO: 2831 - RNA, 21 nt, Artificial Sequence
  Description of Artificial Sequence: Synthetic oligonucleotide
uuaaaacucuaaacuugacua

SEQ ID NO: 2832 - RNA, 21 nt, Artificial Sequence
  Description of Artificial Sequence: Synthetic oligonucleotide
caaaacuugaaagccuccuau

SEQ ID NO: 2833 - RNA, 21 nt, Artificial Sequence
  Description of Artificial Sequence: Synthetic oligonucleotide
ucaacaucgaauagauggauu

SEQ ID NO: 2834 - RNA, 21 nt, Artificial Sequence
  Description of Artificial Sequence: Synthetic oligonucleotide
caaaacuucaaugaaacgugu

SEQ ID NO: 2835 - RNA, 21 nt, Artificial Sequence
  Description of Artificial Sequence: Synthetic oligonucleotide
aaucacgaaaccaacuauacu

SEQ ID NO: 2836 - RNA, 21 nt, Artificial Sequence
  Description of Artificial Sequence: Synthetic oligonucleotide
gggaaucaauuuuagaugguu

SEQ ID NO: 2837 - RNA, 21 nt, Artificial Sequence
  Description of Artificial Sequence: Synthetic oligonucleotide
caaaauguugauccauccaau

SEQ ID NO: 2838 - RNA, 21 nt, Artificial Sequence
  Description of Artificial Sequence: Synthetic oligonucleotide
uggacauuaauucaacaucga

SEQ ID NO: 2839 - DNA, 23 bp, Artificial Sequence
  Description of Artificial Sequence: Synthetic oligonucleotide
  Description of Combined DNA/RNA Molecule: Synthetic oligonucleotide
aggagctuaautgugaacauuuu

SEQ ID NO: 2840 - DNA, 23 bp, Artificial Sequence
  Description of Artificial Sequence: Synthetic oligonucleotide
  Description of Combined DNA/RNA Molecule: Synthetic oligonucleotide
acaucgtcuaacauagcaaaucu

SEQ ID NO: 2841 - DNA, 23 bp, Artificial Sequence
  Description of Artificial Sequence: Synthetic oligonucleotide
  Description of Combined DNA/RNA Molecule: Synthetic oligonucleotide
utacaucgucuaacauagcaaau

SEQ ID NO: 2842 - DNA, 23 bp, Artificial Sequence
  Description of Artificial Sequence: Synthetic oligonucleotide
  Description of Combined DNA/RNA Molecule: Synthetic oligonucleotide
utuacatcguctaacauagcaaa

SEQ ID NO: 2843 - DNA, 23 bp, Artificial Sequence
  Description of Artificial Sequence: Synthetic oligonucleotide
  Description of Combined DNA/RNA Molecule: Synthetic oligonucleotide
uauatgtaguucuucucaguucc

SEQ ID NO: 2844 - DNA, 23 bp, Artificial Sequence
  Description of Artificial Sequence: Synthetic oligonucleotide
  Description of Combined DNA/RNA Molecule: Synthetic oligonucleotide
uauutgacuaugcuguugguuua

SEQ ID NO: 2845 - DNA, 23 bp, Artificial Sequence
  Description of Artificial Sequence: Synthetic oligonucleotide
  Description of Combined DNA/RNA Molecule: Synthetic oligonucleotide
agauagagaaatuucuguggguu

SEQ ID NO: 2846 - DNA, 23 bp, Artificial Sequence
  Description of Artificial Sequence: Synthetic oligonucleotide
  Description of Combined DNA/RNA Molecule: Synthetic oligonucleotide
utaatgtccauggacuaccugau

SEQ ID NO: 2847 - DNA, 23 bp, Artificial Sequence
  Description of Artificial Sequence: Synthetic oligonucleotide
  Description of Combined DNA/RNA Molecule: Synthetic oligonucleotide
aauuaatguccauggacuaccug

SEQ ID NO: 2848 - DNA, 23 bp, Artificial Sequence
  Description of Artificial Sequence: Synthetic oligonucleotide
  Description of Combined DNA/RNA Molecule: Synthetic oligonucleotide
uguctutccagtcuuccaacuca

SEQ ID NO: 2849 - DNA, 23 bp, Artificial Sequence
  Description of Artificial Sequence: Synthetic oligonucleotide
  Description of Combined DNA/RNA Molecule: Synthetic oligonucleotide
ataatgtuugutgucuuuccagu

SEQ ID NO: 2850 - DNA, 23 bp, Artificial Sequence
  Description of Artificial Sequence: Synthetic oligonucleotide
  Description of Combined DNA/RNA Molecule: Synthetic oligonucleotide
utucgugauuucccaaguaaaaa

SEQ ID NO: 2851 - DNA, 23 bp, Artificial Sequence
  Description of Artificial Sequence: Synthetic oligonucleotide
  Description of Combined DNA/RNA Molecule: Synthetic oligonucleotide
uagutgguuucgugauuucccaa

SEQ ID NO: 2852 - DNA, 23 bp, Artificial Sequence
  Description of Artificial Sequence: Synthetic oligonucleotide
  Description of Combined DNA/RNA Molecule: Synthetic oligonucleotide
uauagutgguutcgugauuuccc

SEQ ID NO: 2853 - RNA, 23 nt, Artificial Sequence
  Description of Artificial Sequence: Synthetic oligonucleotide
uguagcguauaguugguuucgug

SEQ ID NO: 2854 - DNA, 23 bp, Artificial Sequence
  Description of Artificial Sequence: Synthetic oligonucleotide
  Description of Combined DNA/RNA Molecule: Synthetic oligonucleotide
uggatcaacautuugguugauuu

SEQ ID NO: 2855 - DNA, 23 bp, Artificial Sequence
  Description of Artificial Sequence: Synthetic oligonucleotide
  Description of Combined DNA/RNA Molecule: Synthetic oligonucleotide
uagucaaguuutgaguuuuaaca

SEQ ID NO: 2856 - DNA, 23 bp, Artificial Sequence
  Description of Artificial Sequence: Synthetic oligonucleotide
  Description of Combined DNA/RNA Molecule: Synthetic oligonucleotide
ataggaggcuutcaaguuuugag

SEQ ID NO: 2857 - DNA, 23 bp, Artificial Sequence
  Description of Artificial Sequence: Synthetic oligonucleotide
  Description of Combined DNA/RNA Molecule: Synthetic oligonucleotide
aauccatcuautcgauguugaau

SEQ ID NO: 2858 - DNA, 23 bp, Artificial Sequence
  Description of Artificial Sequence: Synthetic oligonucleotide
  Description of Combined DNA/RNA Molecule: Synthetic oligonucleotide
acacgutucautgaaguuuugug

SEQ ID NO: 2859 - DNA, 23 bp, Artificial Sequence
  Description of Artificial Sequence: Synthetic oligonucleotide
  Description of Combined DNA/RNA Molecule: Synthetic oligonucleotide
aguataguuggtuucgugauuuc

SEQ ID NO: 2860 - RNA, 23 nt, Artificial Sequence
  Description of Artificial Sequence: Synthetic oligonucleotide
aaccaucuaaaauugauucccac

SEQ ID NO: 2861 - DNA, 23 bp, Artificial Sequence
  Description of Artificial Sequence: Synthetic oligonucleotide
  Description of Combined DNA/RNA Molecule: Synthetic oligonucleotide
atuggatggaucaacauuuuggu

SEQ ID NO: 2862 - DNA, 23 bp, Artificial Sequence
  Description of Artificial Sequence: Synthetic oligonucleotide
  Description of Combined DNA/RNA Molecule: Synthetic oligonucleotide
ucgatgtugaatuaauguccaug

SEQ ID NO: 2863 - DNA, 23 bp, Artificial Sequence
  Description of Artificial Sequence: Synthetic oligonucleotide
  Description of Combined DNA/RNA Molecule: Synthetic oligonucleotide
aggagctuaautgtgaacauuuu

SEQ ID NO: 2864 - DNA, 23 bp, Artificial Sequence
  Description of Artificial Sequence: Synthetic oligonucleotide
  Description of Combined DNA/RNA Molecule: Synthetic oligonucleotide
acaucgtcuaacatagcaaaucu

SEQ ID NO: 2865 - DNA, 23 bp, Artificial Sequence
  Description of Artificial Sequence: Synthetic oligonucleotide
  Description of Combined DNA/RNA Molecule: Synthetic oligonucleotide
utacaucgucuaacatagcaaau

SEQ ID NO: 2866 - DNA, 23 bp, Artificial Sequence
  Description of Artificial Sequence: Synthetic oligonucleotide
  Description of Combined DNA/RNA Molecule: Synthetic oligonucleotide
utuacatcguctaacauagcaaa

SEQ ID NO: 2867 - DNA, 23 bp, Artificial Sequence
  Description of Artificial Sequence: Synthetic oligonucleotide
  Description of Combined DNA/RNA Molecule: Synthetic oligonucleotide
uauatgtaguucutctcaguucc

SEQ ID NO: 2868 - DNA, 23 bp, Artificial Sequence
  Description of Artificial Sequence: Synthetic oligonucleotide
  Description of Combined DNA/RNA Molecule: Synthetic oligonucleotide
uauutgacuaugctgtugguuua

SEQ ID NO: 2869 - DNA, 23 bp, Artificial Sequence
  Description of Artificial Sequence: Synthetic oligonucleotide
  Description of Combined DNA/RNA Molecule: Synthetic oligonucleotide
agauagagaaatutctguggguu

SEQ ID NO: 2870 - DNA, 23 bp, Artificial Sequence
  Description of Artificial Sequence: Synthetic oligonucleotide
  Description of Combined DNA/RNA Molecule: Synthetic oligonucleotide
utaatgtccauggactaccugau

SEQ ID NO: 2871 - DNA, 23 bp, Artificial Sequence
  Description of Artificial Sequence: Synthetic oligonucleotide
  Description of Combined DNA/RNA Molecule: Synthetic oligonucleotide
aauuaatguccauggacuaccug

SEQ ID NO: 2872 - DNA, 23 bp, Artificial Sequence
  Description of Artificial Sequence: Synthetic oligonucleotide
  Description of Combined DNA/RNA Molecule: Synthetic oligonucleotide
uguctutccagtctuccaacuca

SEQ ID NO: 2873 - DNA, 23 bp, Artificial Sequence
  Description of Artificial Sequence: Synthetic oligonucleotide
  Description of Combined DNA/RNA Molecule: Synthetic oligonucleotide
ataatgtuugutgtctuuccagu

SEQ ID NO: 2874 - DNA, 23 bp, Artificial Sequence
  Description of Artificial Sequence: Synthetic oligonucleotide
  Description of Combined DNA/RNA Molecule: Synthetic oligonucleotide
utucgugauuucccaaguaaaaa

SEQ ID NO: 2875 - DNA, 23 bp, Artificial Sequence
  Description of Artificial Sequence: Synthetic oligonucleotide
  Description of Combined DNA/RNA Molecule: Synthetic oligonucleotide
uagutgguuucgugatuucccaa

SEQ ID NO: 2876 - DNA, 23 bp, Artificial Sequence
  Description of Artificial Sequence: Synthetic oligonucleotide
  Description of Combined DNA/RNA Molecule: Synthetic oligonucleotide
uauagutgguutcgugauuuccc

SEQ ID NO: 2877 - DNA, 23 bp, Artificial Sequence
  Description of Artificial Sequence: Synthetic oligonucleotide
  Description of Combined DNA/RNA Molecule: Synthetic oligonucleotide
uguagcguauagutgguuucgug

SEQ ID NO: 2878 - DNA, 23 bp, Artificial Sequence
  Description of Artificial Sequence: Synthetic oligonucleotide
  Description of Combined DNA/RNA Molecule: Synthetic oligonucleotide
uggatcaacaututgguugauuu

SEQ ID NO: 2879 - DNA, 23 bp, Artificial Sequence
  Description of Artificial Sequence: Synthetic oligonucleotide
  Description of Combined DNA/RNA Molecule: Synthetic oligonucleotide
uagucaaguuutgagtuuuaaca

SEQ ID NO: 2880 - DNA, 23 bp, Artificial Sequence
  Description of Artificial Sequence: Synthetic oligonucleotide
  Description of Combined DNA/RNA Molecule: Synthetic oligonucleotide
ataggaggcuutcaaguuuugag

SEQ ID NO: 2881 - DNA, 23 bp, Artificial Sequence
  Description of Artificial Sequence: Synthetic oligonucleotide
  Description of Combined DNA/RNA Molecule: Synthetic oligonucleotide
aauccatcuautcgatguugaau

SEQ ID NO: 2882 - DNA, 23 bp, Artificial Sequence
  Description of Artificial Sequence: Synthetic oligonucleotide
  Description of Combined DNA/RNA Molecule: Synthetic oligonucleotide
acacgutucautgaaguuuugug

SEQ ID NO: 2883 - DNA, 23 bp, Artificial Sequence
  Description of Artificial Sequence: Synthetic oligonucleotide
  Description of Combined DNA/RNA Molecule: Synthetic oligonucleotide
aguataguuggtutcgugauuuc

SEQ ID NO: 2884 - DNA, 23 bp, Artificial Sequence
  Description of Artificial Sequence: Synthetic oligonucleotide
  Description of Combined DNA/RNA Molecule: Synthetic oligonucleotide
aaccaucuaaaautgauucccac

SEQ ID NO: 2885 - DNA, 23 bp, Artificial Sequence
  Description of Artificial Sequence: Synthetic oligonucleotide
  Description of Combined DNA/RNA Molecule: Synthetic oligonucleotide
atuggatggaucaacauuuuggu

SEQ ID NO: 2886 - DNA, 23 bp, Artificial Sequence
  Description of Artificial Sequence: Synthetic oligonucleotide
  Description of Combined DNA/RNA Molecule: Synthetic oligonucleotide
ucgatgtugaatuaatguccaug

SEQ ID NO: 2887 - RNA, 21 nt, Artificial Sequence
  Description of Artificial Sequence: Synthetic oligonucleotide
gccugugaggacuccaagagu

SEQ ID NO: 2888 - RNA, 21 nt, Artificial Sequence
  Description of Artificial Sequence: Synthetic oligonucleotide
ggugcuacucugguauuuccu

SEQ ID NO: 2889 - RNA, 21 nt, Artificial Sequence
  Description of Artificial Sequence: Synthetic oligonucleotide
gugcuacucugguauuuccuu

SEQ ID NO: 2890 - RNA, 21 nt, Artificial Sequence
  Description of Artificial Sequence: Synthetic oligonucleotide
ugcuacucugguauuuccuau

SEQ ID NO: 2891 - RNA, 21 nt, Artificial Sequence
  Description of Artificial Sequence: Synthetic oligonucleotide
gcuacucugguauuuccuagu

SEQ ID NO: 2892 - RNA, 21 nt, Artificial Sequence
  Description of Artificial Sequence: Synthetic oligonucleotide
cuacucugguauuuccuaggu

SEQ ID NO: 2893 - RNA, 21 nt, Artificial Sequence
  Description of Artificial Sequence: Synthetic oligonucleotide
uacucugguauuuccuagggu

SEQ ID NO: 2894 - RNA, 21 nt, Artificial Sequence
  Description of Artificial Sequence: Synthetic oligonucleotide
acucugguauuuccuaggguu

SEQ ID NO: 2895 - RNA, 21 nt, Artificial Sequence
  Description of Artificial Sequence: Synthetic oligonucleotide
cucugguauuuccuaggguau

SEQ ID NO: 2896 - RNA, 21 nt, Artificial Sequence
  Description of Artificial Sequence: Synthetic oligonucleotide
ucugguauuuccuaggguacu

SEQ ID NO: 2897 - RNA, 21 nt, Artificial Sequence
  Description of Artificial Sequence: Synthetic oligonucleotide
auuuccuaggguacaaggcgu

SEQ ID NO: 2898 - RNA, 21 nt, Artificial Sequence
  Description of Artificial Sequence: Synthetic oligonucleotide
ggucagccagguguacucagu

SEQ ID NO: 2899 - RNA, 21 nt, Artificial Sequence
  Description of Artificial Sequence: Synthetic oligonucleotide
agccagguguacucaggcagu

SEQ ID NO: 2900 - RNA, 21 nt, Artificial Sequence
  Description of Artificial Sequence: Synthetic oligonucleotide
gccacuucucccaggaucuuu

SEQ ID NO: 2901 - RNA, 21 nt, Artificial Sequence
  Description of Artificial Sequence: Synthetic oligonucleotide
uucucccaggaucuuacccgu

SEQ ID NO: 2902 - RNA, 21 nt, Artificial Sequence
  Description of Artificial Sequence: Synthetic oligonucleotide
ucccaggaucuuacccgccgu

SEQ ID NO: 2903 - RNA, 21 nt, Artificial Sequence
  Description of Artificial Sequence: Synthetic oligonucleotide
gccuuccgcagugaaaccgcu

SEQ ID NO: 2904 - RNA, 21 nt, Artificial Sequence
  Description of Artificial Sequence: Synthetic oligonucleotide
caacuccagcuccgucuauuu

SEQ ID NO: 2905 - RNA, 21 nt, Artificial Sequence
  Description of Artificial Sequence: Synthetic oligonucleotide
cagcuccgucuauuccuuugu

SEQ ID NO: 2906 - RNA, 21 nt, Artificial Sequence
  Description of Artificial Sequence: Synthetic oligonucleotide
cucaccugcuucuucugguuu

SEQ ID NO: 2907 - RNA, 21 nt, Artificial Sequence
  Description of Artificial Sequence: Synthetic oligonucleotide
ucaccugcuucuucugguucu

SEQ ID NO: 2908 - RNA, 21 nt, Artificial Sequence
  Description of Artificial Sequence: Synthetic oligonucleotide
accugcuucuucugguucauu

SEQ ID NO: 2909 - RNA, 21 nt, Artificial Sequence
  Description of Artificial Sequence: Synthetic oligonucleotide
ccugcuucuucugguucauuu

SEQ ID NO: 2910 - RNA, 21 nt, Artificial Sequence
  Description of Artificial Sequence: Synthetic oligonucleotide
ugcuucuucugguucauucuu

SEQ ID NO: 2911 - RNA, 21 nt, Artificial Sequence
  Description of Artificial Sequence: Synthetic oligonucleotide
gcuucuucugguucauucucu

SEQ ID NO: 2912 - RNA, 21 nt, Artificial Sequence
  Description of Artificial Sequence: Synthetic oligonucleotide
cuucuucugguucauucuccu

SEQ ID NO: 2913 - RNA, 21 nt, Artificial Sequence
  Description of Artificial Sequence: Synthetic oligonucleotide
uucuucugguucauucuccau

SEQ ID NO: 2914 - RNA, 21 nt, Artificial Sequence
  Description of Artificial Sequence: Synthetic oligonucleotide
cugguucauucuccaaauccu

SEQ ID NO: 2915 - RNA, 21 nt, Artificial Sequence
  Description of Artificial Sequence: Synthetic oligonucleotide
acagggccgaguacgaagugu

SEQ ID NO: 2916 - RNA, 21 nt, Artificial Sequence
  Description of Artificial Sequence: Synthetic oligonucleotide
cagggccgaguacgaaguggu

SEQ ID NO: 2917 - RNA, 21 nt, Artificial Sequence
  Description of Artificial Sequence: Synthetic oligonucleotide
ccagugugaaagacauagcuu

SEQ ID NO: 2918 - RNA, 21 nt, Artificial Sequence
  Description of Artificial Sequence: Synthetic oligonucleotide
cagugugaaagacauagcugu

SEQ ID NO: 2919 - RNA, 21 nt, Artificial Sequence
  Description of Artificial Sequence: Synthetic oligonucleotide
auugaauuccacgcuggguuu

SEQ ID NO: 2920 - RNA, 21 nt, Artificial Sequence
  Description of Artificial Sequence: Synthetic oligonucleotide
uugaauuccacgcuggguugu

SEQ ID NO: 2921 - RNA, 21 nt, Artificial Sequence
  Description of Artificial Sequence: Synthetic oligonucleotide
ugaauuccacgcuggguuguu

SEQ ID NO: 2922 - RNA, 21 nt, Artificial Sequence
  Description of Artificial Sequence: Synthetic oligonucleotide
aauuccacgcuggguuguuau

SEQ ID NO: 2923 - RNA, 21 nt, Artificial Sequence
  Description of Artificial Sequence: Synthetic oligonucleotide
uccacgcuggguuguuaccgu

SEQ ID NO: 2924 - RNA, 21 nt, Artificial Sequence
  Description of Artificial Sequence: Synthetic oligonucleotide
ccacgcuggguuguuaccgcu

SEQ ID NO: 2925 - RNA, 21 nt, Artificial Sequence
  Description of Artificial Sequence: Synthetic oligonucleotide
cacgcuggguuguuaccgcuu

SEQ ID NO: 2926 - RNA, 21 nt, Artificial Sequence
  Description of Artificial Sequence: Synthetic oligonucleotide
cuggguuguuaccgcuacagu

SEQ ID NO: 2927 - RNA, 21 nt, Artificial Sequence
  Description of Artificial Sequence: Synthetic oligonucleotide
gggaccgacuggccauguauu

SEQ ID NO: 2928 - RNA, 21 nt, Artificial Sequence
  Description of Artificial Sequence: Synthetic oligonucleotide
ggaccgacuggccauguaugu

SEQ ID NO: 2929 - RNA, 21 nt, Artificial Sequence
  Description of Artificial Sequence: Synthetic oligonucleotide
accgacuggccauguaugacu

SEQ ID NO: 2930 - RNA, 21 nt, Artificial Sequence
  Description of Artificial Sequence: Synthetic oligonucleotide
ccgacuggccauguaugacgu

SEQ ID NO: 2931 - RNA, 21 nt, Artificial Sequence
  Description of Artificial Sequence: Synthetic oligonucleotide
gacuggccauguaugacgugu

SEQ ID NO: 2932 - RNA, 21 nt, Artificial Sequence
  Description of Artificial Sequence: Synthetic oligonucleotide
acuggccauguaugacguggu

SEQ ID NO: 2933 - RNA, 21 nt, Artificial Sequence
  Description of Artificial Sequence: Synthetic oligonucleotide
cuggccauguaugacguggcu

SEQ ID NO: 2934 - RNA, 21 nt, Artificial Sequence
  Description of Artificial Sequence: Synthetic oligonucleotide
aggcucaucaccucgguguau

SEQ ID NO: 2935 - RNA, 21 nt, Artificial Sequence
  Description of Artificial Sequence: Synthetic oligonucleotide
gccugcacagcuacuacgacu

SEQ ID NO: 2936 - RNA, 21 nt, Artificial Sequence
  Description of Artificial Sequence: Synthetic oligonucleotide
ccugcacagcuacuacgaccu

SEQ ID NO: 2937 - RNA, 21 nt, Artificial Sequence
  Description of Artificial Sequence: Synthetic oligonucleotide
ccucucuggacuacggcuugu

SEQ ID NO: 2938 - RNA, 21 nt, Artificial Sequence
  Description of Artificial Sequence: Synthetic oligonucleotide
ucucuggacuacggcuuggcu

SEQ ID NO: 2939 - RNA, 21 nt, Artificial Sequence
  Description of Artificial Sequence: Synthetic oligonucleotide
uacggcuuggcccucugguuu

SEQ ID NO: 2940 - RNA, 21 nt, Artificial Sequence
  Description of Artificial Sequence: Synthetic oligonucleotide
acggcuuggcccucugguuuu

SEQ ID NO: 2941 - RNA, 21 nt, Artificial Sequence
  Description of Artificial Sequence: Synthetic oligonucleotide
cggcuuggcccucugguuugu

SEQ ID NO: 2942 - RNA, 21 nt, Artificial Sequence
  Description of Artificial Sequence: Synthetic oligonucleotide
ggcuuggcccucugguuugau

SEQ ID NO: 2943 - RNA, 21 nt, Artificial Sequence
  Description of Artificial Sequence: Synthetic oligonucleotide
gaggaggcagaaguaugauuu

SEQ ID NO: 2944 - RNA, 21 nt, Artificial Sequence
  Description of Artificial Sequence: Synthetic oligonucleotide
ggaggcagaaguaugauuugu

SEQ ID NO: 2945 - RNA, 21 nt, Artificial Sequence
  Description of Artificial Sequence: Synthetic oligonucleotide
gaggcagaaguaugauuugcu

SEQ ID NO: 2946 - RNA, 21 nt, Artificial Sequence
  Description of Artificial Sequence: Synthetic oligonucleotide
aggcagaaguaugauuugccu

SEQ ID NO: 2947 - RNA, 21 nt, Artificial Sequence
  Description of Artificial Sequence: Synthetic oligonucleotide
ggcagaaguaugauuugccgu

SEQ ID NO: 2948 - RNA, 21 nt, Artificial Sequence
  Description of Artificial Sequence: Synthetic oligonucleotide
gcagaaguaugauuugccguu

SEQ ID NO: 2949 - RNA, 21 nt, Artificial Sequence
  Description of Artificial Sequence: Synthetic oligonucleotide
cagaaguaugauuugccgugu

SEQ ID NO: 2950 - RNA, 21 nt, Artificial Sequence
  Description of Artificial Sequence: Synthetic oligonucleotide
agaaguaugauuugccgugcu

SEQ ID NO: 2951 - RNA, 21 nt, Artificial Sequence
  Description of Artificial Sequence: Synthetic oligonucleotide
gaaguaugauuugccgugcau

SEQ ID NO: 2952 - RNA, 21 nt, Artificial Sequence
  Description of Artificial Sequence: Synthetic oligonucleotide
caguggacgauccagaacagu

SEQ ID NO: 2953 - RNA, 21 nt, Artificial Sequence
  Description of Artificial Sequence: Synthetic oligonucleotide
aguggacgauccagaacaggu

SEQ ID NO: 2954 - RNA, 21 nt, Artificial Sequence
  Description of Artificial Sequence: Synthetic oligonucleotide
ccagaacaggaggcugugugu

SEQ ID NO: 2955 - RNA, 21 nt, Artificial Sequence
  Description of Artificial Sequence: Synthetic oligonucleotide
agaacaggaggcuguguggcu

SEQ ID NO: 2956 - RNA, 21 nt, Artificial Sequence
  Description of Artificial Sequence: Synthetic oligonucleotide
ugugcgggugcacuauggcuu

SEQ ID NO: 2957 - RNA, 21 nt, Artificial Sequence
  Description of Artificial Sequence: Synthetic oligonucleotide
gugcgggugcacuauggcuuu

SEQ ID NO: 2958 - RNA, 21 nt, Artificial Sequence
  Description of Artificial Sequence: Synthetic oligonucleotide
gcgggugcacuauggcuuguu

SEQ ID NO: 2959 - RNA, 21 nt, Artificial Sequence
  Description of Artificial Sequence: Synthetic oligonucleotide
gggugcacuauggcuuguacu

SEQ ID NO: 2960 - RNA, 21 nt, Artificial Sequence
  Description of Artificial Sequence: Synthetic oligonucleotide
acuauggcuuguacaaccagu

SEQ ID NO: 2961 - RNA, 21 nt, Artificial Sequence
  Description of Artificial Sequence: Synthetic oligonucleotide
gcuuguacaaccagucggacu

SEQ ID NO: 2962 - RNA, 21 nt, Artificial Sequence
  Description of Artificial Sequence: Synthetic oligonucleotide
cugcccuggagaguuccucuu

SEQ ID NO: 2963 - RNA, 21 nt, Artificial Sequence
  Description of Artificial Sequence: Synthetic oligonucleotide
gccuggaugagagaaacugcu

SEQ ID NO: 2964 - RNA, 21 nt, Artificial Sequence
  Description of Artificial Sequence: Synthetic oligonucleotide
uggaugagagaaacugcguuu

SEQ ID NO: 2965 - RNA, 21 nt, Artificial Sequence
  Description of Artificial Sequence: Synthetic oligonucleotide
ggaugagagaaacugcguuuu

SEQ ID NO: 2966 - RNA, 21 nt, Artificial Sequence
  Description of Artificial Sequence: Synthetic oligonucleotide
gagagaaacugcguuugcagu

SEQ ID NO: 2967 - RNA, 21 nt, Artificial Sequence
  Description of Artificial Sequence: Synthetic oligonucleotide
uuugcagagccacauuccagu

SEQ ID NO: 2968 - RNA, 21 nt, Artificial Sequence
  Description of Artificial Sequence: Synthetic oligonucleotide
gugggacauucaccuuccagu

SEQ ID NO: 2969 - RNA, 21 nt, Artificial Sequence
  Description of Artificial Sequence: Synthetic oligonucleotide
ugggacauucaccuuccaguu

SEQ ID NO: 2970 - RNA, 21 nt, Artificial Sequence
  Description of Artificial Sequence: Synthetic oligonucleotide
ggacauucaccuuccaguguu

SEQ ID NO: 2971 - RNA, 21 nt, Artificial Sequence
  Description of Artificial Sequence: Synthetic oligonucleotide
gacauucaccuuccagugugu

SEQ ID NO: 2972 - RNA, 21 nt, Artificial Sequence
  Description of Artificial Sequence: Synthetic oligonucleotide
acauucaccuuccagugugau

SEQ ID NO: 2973 - RNA, 21 nt, Artificial Sequence
  Description of Artificial Sequence: Synthetic oligonucleotide
cauucaccuuccagugugagu

SEQ ID NO: 2974 - RNA, 21 nt, Artificial Sequence
  Description of Artificial Sequence: Synthetic oligonucleotide
aucgcugaccgcugggugauu

SEQ ID NO: 2975 - RNA, 21 nt, Artificial Sequence
  Description of Artificial Sequence: Synthetic oligonucleotide
ugaccgcugggugauaacagu

SEQ ID NO: 2976 - RNA, 21 nt, Artificial Sequence
  Description of Artificial Sequence: Synthetic oligonucleotide
cguguuccugggcaagguguu

SEQ ID NO: 2977 - RNA, 21 nt, Artificial Sequence
  Description of Artificial Sequence: Synthetic oligonucleotide
guguuccugggcaaggugugu

SEQ ID NO: 2978 - RNA, 21 nt, Artificial Sequence
  Description of Artificial Sequence: Synthetic oligonucleotide
gcaagguguggcagaacucgu

SEQ ID NO: 2979 - RNA, 21 nt, Artificial Sequence
  Description of Artificial Sequence: Synthetic oligonucleotide
aagguguggcagaacucgcgu

SEQ ID NO: 2980 - RNA, 21 nt, Artificial Sequence
  Description of Artificial Sequence: Synthetic oligonucleotide
cuggagagguguccuucaagu

SEQ ID NO: 2981 - RNA, 21 nt, Artificial Sequence
  Description of Artificial Sequence: Synthetic oligonucleotide
uggagagguguccuucaaggu

SEQ ID NO: 2982 - RNA, 21 nt, Artificial Sequence
  Description of Artificial Sequence: Synthetic oligonucleotide
gagagguguccuucaaggugu

SEQ ID NO: 2983 - RNA, 21 nt, Artificial Sequence
  Description of Artificial Sequence: Synthetic oligonucleotide
agagguguccuucaaggugau

SEQ ID NO: 2984 - RNA, 21 nt, Artificial Sequence
  Description of Artificial Sequence: Synthetic oligonucleotide
aucccacaggaccugugcagu

SEQ ID NO: 2985 - RNA, 21 nt, Artificial Sequence
  Description of Artificial Sequence: Synthetic oligonucleotide
ugacgccacgcaugcuguguu

SEQ ID NO: 2986 - RNA, 21 nt, Artificial Sequence
  Description of Artificial Sequence: Synthetic oligonucleotide
gacgccacgcaugcugugugu

SEQ ID NO: 2987 - RNA, 21 nt, Artificial Sequence
  Description of Artificial Sequence: Synthetic oligonucleotide
gcuaccgcaagggcaagaagu

SEQ ID NO: 2988 - RNA, 21 nt, Artificial Sequence
  Description of Artificial Sequence: Synthetic oligonucleotide
cuaccgcaagggcaagaaggu

SEQ ID NO: 2989 - RNA, 21 nt, Artificial Sequence
  Description of Artificial Sequence: Synthetic oligonucleotide
ggccuaacuacuucggcgucu

SEQ ID NO: 2990 - RNA, 21 nt, Artificial Sequence
  Description of Artificial Sequence: Synthetic oligonucleotide
gccuaacuacuucggcgucuu

SEQ ID NO: 2991 - RNA, 21 nt, Artificial Sequence
  Description of Artificial Sequence: Synthetic oligonucleotide
cuacacccgcaucacaggugu

SEQ ID NO: 2992 - RNA, 21 nt, Artificial Sequence
  Description of Artificial Sequence: Synthetic oligonucleotide
gcuggauccagcaaguggugu

SEQ ID NO: 2993 - RNA, 21 nt, Artificial Sequence
  Description of Artificial Sequence: Synthetic oligonucleotide
uggcaggagguggcaucuugu

SEQ ID NO: 2994 - RNA, 21 nt, Artificial Sequence
  Description of Artificial Sequence: Synthetic oligonucleotide
ggcaggagguggcaucuuguu

SEQ ID NO: 2995 - RNA, 21 nt, Artificial Sequence
  Description of Artificial Sequence: Synthetic oligonucleotide
gcaggagguggcaucuugucu

SEQ ID NO: 2996 - RNA, 21 nt, Artificial Sequence
  Description of Artificial Sequence: Synthetic oligonucleotide
caggagguggcaucuugucuu

SEQ ID NO: 2997 - RNA, 21 nt, Artificial Sequence
  Description of Artificial Sequence: Synthetic oligonucleotide
ugaugucugcuccagugaugu

SEQ ID NO: 2998 - RNA, 21 nt, Artificial Sequence
  Description of Artificial Sequence: Synthetic oligonucleotide
caauucucucuccuccguccu

SEQ ID NO: 2999 - RNA, 21 nt, Artificial Sequence
  Description of Artificial Sequence: Synthetic oligonucleotide
ggcucagcagcaagaaugcuu

SEQ ID NO: 3000 - RNA, 21 nt, Artificial Sequence
  Description of Artificial Sequence: Synthetic oligonucleotide
gcucagcagcaagaaugcugu

SEQ ID NO: 3001 - RNA, 21 nt, Artificial Sequence
  Description of Artificial Sequence: Synthetic oligonucleotide
cuggucuaacuugggaucugu

SEQ ID NO: 3002 - RNA, 21 nt, Artificial Sequence
  Description of Artificial Sequence: Synthetic oligonucleotide
uggucuaacuugggaucuggu

SEQ ID NO: 3003 - RNA, 21 nt, Artificial Sequence
  Description of Artificial Sequence: Synthetic oligonucleotide
ggucuaacuugggaucugggu

SEQ ID NO: 3004 - RNA, 21 nt, Artificial Sequence
  Description of Artificial Sequence: Synthetic oligonucleotide
uaacuugggaucugggaaugu

SEQ ID NO: 3005 - RNA, 21 nt, Artificial Sequence
  Description of Artificial Sequence: Synthetic oligonucleotide
uugggaucugggaauggaagu

SEQ ID NO: 3006 - RNA, 21 nt, Artificial Sequence
  Description of Artificial Sequence: Synthetic oligonucleotide
ggaucugggaauggaaggugu

SEQ ID NO: 3007 - RNA, 21 nt, Artificial Sequence
  Description of Artificial Sequence: Synthetic oligonucleotide
ugagcucagcugcccuuuggu

SEQ ID NO: 3008 - RNA, 21 nt, Artificial Sequence
  Description of Artificial Sequence: Synthetic oligonucleotide
gagcucagcugcccuuuggau

SEQ ID NO: 3009 - RNA, 21 nt, Artificial Sequence
  Description of Artificial Sequence: Synthetic oligonucleotide
gcucagcugcccuuuggaauu

SEQ ID NO: 3010 - RNA, 21 nt, Artificial Sequence
  Description of Artificial Sequence: Synthetic oligonucleotide
agcugcccuuuggaauaaagu

SEQ ID NO: 3011 - RNA, 21 nt, Artificial Sequence
  Description of Artificial Sequence: Synthetic oligonucleotide
cugcccuuuggaauaaagcuu

SEQ ID NO: 3012 - RNA, 21 nt, Artificial Sequence
  Description of Artificial Sequence: Synthetic oligonucleotide
ugcccuuuggaauaaagcugu

SEQ ID NO: 3013 - DNA, 23 bp, Artificial Sequence
  Description of Artificial Sequence: Synthetic oligonucleotide
  Description of Combined DNA/RNA Molecule: Synthetic oligonucleotide
acuctuggaguccucacaggccu

SEQ ID NO: 3014 - DNA, 23 bp, Artificial Sequence
  Description of Artificial Sequence: Synthetic oligonucleotide
  Description of Combined DNA/RNA Molecule: Synthetic oligonucleotide
aggaaataccagaguagcacccc

SEQ ID NO: 3015 - RNA, 23 nt, Artificial Sequence
  Description of Artificial Sequence: Synthetic oligonucleotide
aaggaaauaccagaguagcaccc

SEQ ID NO: 3016 - DNA, 23 bp, Artificial Sequence
  Description of Artificial Sequence: Synthetic oligonucleotide
  Description of Combined DNA/RNA Molecule: Synthetic oligonucleotide
ataggaaauaccagaguagcacc

SEQ ID NO: 3017 - RNA, 23 nt, Artificial Sequence
  Description of Artificial Sequence: Synthetic oligonucleotide
acuaggaaauaccagaguagcac

SEQ ID NO: 3018 - RNA, 23 nt, Artificial Sequence
  Description of Artificial Sequence: Synthetic oligonucleotide
accuaggaaauaccagaguagca

SEQ ID NO: 3019 - DNA, 23 bp, Artificial Sequence
  Description of Artificial Sequence: Synthetic oligonucleotide
  Description of Combined DNA/RNA Molecule: Synthetic oligonucleotide
accctaggaaataccagaguagc

SEQ ID NO: 3020 - RNA, 23 nt, Artificial Sequence
  Description of Artificial Sequence: Synthetic oligonucleotide
aacccuaggaaauaccagaguag

SEQ ID NO: 3021 - DNA, 23 bp, Artificial Sequence
  Description of Artificial Sequence: Synthetic oligonucleotide
  Description of Combined DNA/RNA Molecule: Synthetic oligonucleotide
ataccctaggaaauaccagagua

SEQ ID NO: 3022 - RNA, 23 nt, Artificial Sequence
  Description of Artificial Sequence: Synthetic oligonucleotide
aguacccuaggaaauaccagagu

SEQ ID NO: 3023 - DNA, 23 bp, Artificial Sequence
  Description of Artificial Sequence: Synthetic oligonucleotide
  Description of Combined DNA/RNA Molecule: Synthetic oligonucleotide
acgccutguacccuaggaaauac

SEQ ID NO: 3024 - DNA, 23 bp, Artificial Sequence
  Description of Artificial Sequence: Synthetic oligonucleotide
  Description of Combined DNA/RNA Molecule: Synthetic oligonucleotide
acugagtacaccuggcugaccau

SEQ ID NO: 3025 - DNA, 23 bp, Artificial Sequence
  Description of Artificial Sequence: Synthetic oligonucleotide
  Description of Combined DNA/RNA Molecule: Synthetic oligonucleotide
acugcctgaguacaccuggcuga

SEQ ID NO: 3026 - RNA, 23 nt, Artificial Sequence
  Description of Artificial Sequence: Synthetic oligonucleotide
aaagauccugggagaaguggcga

SEQ ID NO: 3027 - RNA, 23 nt, Artificial Sequence
  Description of Artificial Sequence: Synthetic oligonucleotide
acggguaagauccugggagaagu

SEQ ID NO: 3028 - RNA, 23 nt, Artificial Sequence
  Description of Artificial Sequence: Synthetic oligonucleotide
acggcggguaagauccugggaga

SEQ ID NO: 3029 - DNA, 23 bp, Artificial Sequence
  Description of Artificial Sequence: Synthetic oligonucleotide
  Description of Combined DNA/RNA Molecule: Synthetic oligonucleotide
agcggutucactgcggaaggcac

SEQ ID NO: 3030 - RNA, 23 nt, Artificial Sequence
  Description of Artificial Sequence: Synthetic oligonucleotide
aaauagacggagcuggaguugua

SEQ ID NO: 3031 - RNA, 23 nt, Artificial Sequence
  Description of Artificial Sequence: Synthetic oligonucleotide
acaaaggaauagacggagcugga

SEQ ID NO: 3032 - RNA, 23 nt, Artificial Sequence
  Description of Artificial Sequence: Synthetic oligonucleotide
aaaccagaagaagcaggugaggg

SEQ ID NO: 3033 - RNA, 23 nt, Artificial Sequence
  Description of Artificial Sequence: Synthetic oligonucleotide
agaaccagaagaagcaggugagg

SEQ ID NO: 3034 - RNA, 23 nt, Artificial Sequence
  Description of Artificial Sequence: Synthetic oligonucleotide
aaugaaccagaagaagcagguga

SEQ ID NO: 3035 - RNA, 23 nt, Artificial Sequence
  Description of Artificial Sequence: Synthetic oligonucleotide
aaaugaaccagaagaagcaggug

SEQ ID NO: 3036 - RNA, 23 nt, Artificial Sequence
  Description of Artificial Sequence: Synthetic oligonucleotide
aagaaugaaccagaagaagcagg

SEQ ID NO: 3037 - DNA, 23 bp, Artificial Sequence
  Description of Artificial Sequence: Synthetic oligonucleotide
  Description of Combined DNA/RNA Molecule: Synthetic oligonucleotide
agagaatgaaccagaagaagcag

SEQ ID NO: 3038 - RNA, 23 nt, Artificial Sequence
  Description of Artificial Sequence: Synthetic oligonucleotide
aggagaaugaaccagaagaagca

SEQ ID NO: 3039 - DNA, 23 bp, Artificial Sequence
  Description of Artificial Sequence: Synthetic oligonucleotide
  Description of Combined DNA/RNA Molecule: Synthetic oligonucleotide
atggagaaugaaccagaagaagc

SEQ ID NO: 3040 - DNA, 23 bp, Artificial Sequence
  Description of Artificial Sequence: Synthetic oligonucleotide
  Description of Combined DNA/RNA Molecule: Synthetic oligonucleotide
aggatutggagaaugaaccagaa

SEQ ID NO: 3041 - DNA, 23 bp, Artificial Sequence
  Description of Artificial Sequence: Synthetic oligonucleotide
  Description of Combined DNA/RNA Molecule: Synthetic oligonucleotide
acactucguactcggcccuguag

SEQ ID NO: 3042 - DNA, 23 bp, Artificial Sequence
  Description of Artificial Sequence: Synthetic oligonucleotide
  Description of Combined DNA/RNA Molecule: Synthetic oligonucleotide
accacutcguacucggcccugua

SEQ ID NO: 3043 - DNA, 23 bp, Artificial Sequence
  Description of Artificial Sequence: Synthetic oligonucleotide
  Description of Combined DNA/RNA Molecule: Synthetic oligonucleotide
aagctatgucutucacacuggcu

SEQ ID NO: 3044 - DNA, 23 bp, Artificial Sequence
  Description of Artificial Sequence: Synthetic oligonucleotide
  Description of Combined DNA/RNA Molecule: Synthetic oligonucleotide
acagcuauguctuucacacuggc

SEQ ID NO: 3045 - RNA, 23 nt, Artificial Sequence
  Description of Artificial Sequence: Synthetic oligonucleotide
aaacccagcguggaauucaaugc

SEQ ID NO: 3046 - DNA, 23 bp, Artificial Sequence
  Description of Artificial Sequence: Synthetic oligonucleotide
  Description of Combined DNA/RNA Molecule: Synthetic oligonucleotide
acaacccagcgtggaauucaaug

SEQ ID NO: 3047 - RNA, 23 nt, Artificial Sequence
  Description of Artificial Sequence: Synthetic oligonucleotide
aacaacccagcguggaauucaau

SEQ ID NO: 3048 - DNA, 23 bp, Artificial Sequence
  Description of Artificial Sequence: Synthetic oligonucleotide
  Description of Combined DNA/RNA Molecule: Synthetic oligonucleotide
ataacaacccagcguggaauuca

SEQ ID NO: 3049 - DNA, 23 bp, Artificial Sequence
  Description of Artificial Sequence: Synthetic oligonucleotide
  Description of Combined DNA/RNA Molecule: Synthetic oligonucleotide
acggtaacaacccagcguggaau

SEQ ID NO: 3050 - RNA, 23 nt, Artificial Sequence
  Description of Artificial Sequence: Synthetic oligonucleotide
agcgguaacaacccagcguggaa

SEQ ID NO: 3051 - DNA, 23 bp, Artificial Sequence
  Description of Artificial Sequence: Synthetic oligonucleotide
  Description of Combined DNA/RNA Molecule: Synthetic oligonucleotide
aagcggtaacaacccagcgugga

SEQ ID NO: 3052 - DNA, 23 bp, Artificial Sequence
  Description of Artificial Sequence: Synthetic oligonucleotide
  Description of Combined DNA/RNA Molecule: Synthetic oligonucleotide
acugtagcgguaacaacccagcg

SEQ ID NO: 3053 - DNA, 23 bp, Artificial Sequence
  Description of Artificial Sequence: Synthetic oligonucleotide
  Description of Combined DNA/RNA Molecule: Synthetic oligonucleotide
aauacatggccagucggucccgg

SEQ ID NO: 3054 - RNA, 23 nt, Artificial Sequence
  Description of Artificial Sequence: Synthetic oligonucleotide
acauacauggccagucggucccg

SEQ ID NO: 3055 - RNA, 23 nt, Artificial Sequence
  Description of Artificial Sequence: Synthetic oligonucleotide
agucauacauggccagucggucc

SEQ ID NO: 3056 - DNA, 23 bp, Artificial Sequence
  Description of Artificial Sequence: Synthetic oligonucleotide
  Description of Combined DNA/RNA Molecule: Synthetic oligonucleotide
acgucatacauggccagucgguc

SEQ ID NO: 3057 - RNA, 23 nt, Artificial Sequence
  Description of Artificial Sequence: Synthetic oligonucleotide
acacgucauacauggccagucgg

SEQ ID NO: 3058 - DNA, 23 bp, Artificial Sequence
  Description of Artificial Sequence: Synthetic oligonucleotide
  Description of Combined DNA/RNA Molecule: Synthetic oligonucleotide
accacgtcauacauggccagucg

SEQ ID NO: 3059 - RNA, 23 nt, Artificial Sequence
  Description of Artificial Sequence: Synthetic oligonucleotide
agccacgucauacauggccaguc

SEQ ID NO: 3060 - DNA, 23 bp, Artificial Sequence
  Description of Artificial Sequence: Synthetic oligonucleotide
  Description of Combined DNA/RNA Molecule: Synthetic oligonucleotide
atacaccgaggtgaugagccucu

SEQ ID NO: 3061 - RNA, 23 nt, Artificial Sequence
  Description of Artificial Sequence: Synthetic oligonucleotide
agucguaguagcugugcaggccc

SEQ ID NO: 3062 - DNA, 23 bp, Artificial Sequence
  Description of Artificial Sequence: Synthetic oligonucleotide
  Description of Combined DNA/RNA Molecule: Synthetic oligonucleotide
aggucgtaguagcugugcaggcc

SEQ ID NO: 3063 - DNA, 23 bp, Artificial Sequence
  Description of Artificial Sequence: Synthetic oligonucleotide
  Description of Combined DNA/RNA Molecule: Synthetic oligonucleotide
acaagccguagtccagagagggc

SEQ ID NO: 3064 - RNA, 23 nt, Artificial Sequence
  Description of Artificial Sequence: Synthetic oligonucleotide
agccaagccguaguccagagagg

SEQ ID NO: 3065 - RNA, 23 nt, Artificial Sequence
  Description of Artificial Sequence: Synthetic oligonucleotide
aaaccagagggccaagccguagu

SEQ ID NO: 3066 - RNA, 23 nt, Artificial Sequence
  Description of Artificial Sequence: Synthetic oligonucleotide
aaaaccagagggccaagccguag

SEQ ID NO: 3067 - RNA, 23 nt, Artificial Sequence
  Description of Artificial Sequence: Synthetic oligonucleotide
acaaaccagagggccaagccgua

SEQ ID NO: 3068 - DNA, 23 bp, Artificial Sequence
  Description of Artificial Sequence: Synthetic oligonucleotide
  Description of Combined DNA/RNA Molecule: Synthetic oligonucleotide
atcaaaccagagggccaagccgu

SEQ ID NO: 3069 - DNA, 23 bp, Artificial Sequence
  Description of Artificial Sequence: Synthetic oligonucleotide
  Description of Combined DNA/RNA Molecule: Synthetic oligonucleotide
aaaucatacuucugccuccucag

SEQ ID NO: 3070 - DNA, 23 bp, Artificial Sequence
  Description of Artificial Sequence: Synthetic oligonucleotide
  Description of Combined DNA/RNA Molecule: Synthetic oligonucleotide
acaaaucauactucugccuccuc

SEQ ID NO: 3071 - DNA, 23 bp, Artificial Sequence
  Description of Artificial Sequence: Synthetic oligonucleotide
  Description of Combined DNA/RNA Molecule: Synthetic oligonucleotide
agcaaatcauacuucugccuccu

SEQ ID NO: 3072 - RNA, 23 nt, Artificial Sequence
  Description of Artificial Sequence: Synthetic oligonucleotide
aggcaaaucauacuucugccucc

SEQ ID NO: 3073 - DNA, 23 bp, Artificial Sequence
  Description of Artificial Sequence: Synthetic oligonucleotide
  Description of Combined DNA/RNA Molecule: Synthetic oligonucleotide
acggcaaaucatacuucugccuc

SEQ ID NO: 3074 - RNA, 23 nt, Artificial Sequence
  Description of Artificial Sequence: Synthetic oligonucleotide
aacggcaaaucauacuucugccu

SEQ ID NO: 3075 - RNA, 23 nt, Artificial Sequence
  Description of Artificial Sequence: Synthetic oligonucleotide
acacggcaaaucauacuucugcc

SEQ ID NO: 3076 - DNA, 23 bp, Artificial Sequence
  Description of Artificial Sequence: Synthetic oligonucleotide
  Description of Combined DNA/RNA Molecule: Synthetic oligonucleotide
agcacggcaaatcauacuucugc

SEQ ID NO: 3077 - DNA, 23 bp, Artificial Sequence
  Description of Artificial Sequence: Synthetic oligonucleotide
  Description of Combined DNA/RNA Molecule: Synthetic oligonucleotide
atgcacggcaaaucauacuucug

SEQ ID NO: 3078 - DNA, 23 bp, Artificial Sequence
  Description of Artificial Sequence: Synthetic oligonucleotide
  Description of Combined DNA/RNA Molecule: Synthetic oligonucleotide
acugtucuggatcguccacuggc

SEQ ID NO: 3079 - DNA, 23 bp, Artificial Sequence
  Description of Artificial Sequence: Synthetic oligonucleotide
  Description of Combined DNA/RNA Molecule: Synthetic oligonucleotide
accugutcuggaucguccacugg

SEQ ID NO: 3080 - RNA, 23 nt, Artificial Sequence
  Description of Artificial Sequence: Synthetic oligonucleotide
acacacagccuccuguucuggau

SEQ ID NO: 3081 - RNA, 23 nt, Artificial Sequence
  Description of Artificial Sequence: Synthetic oligonucleotide
agccacacagccuccuguucugg

SEQ ID NO: 3082 - DNA, 23 bp, Artificial Sequence
  Description of Artificial Sequence: Synthetic oligonucleotide
  Description of Combined DNA/RNA Molecule: Synthetic oligonucleotide
aagccatagugcacccgcacacc

SEQ ID NO: 3083 - RNA, 23 nt, Artificial Sequence
  Description of Artificial Sequence: Synthetic oligonucleotide
aaagccauagugcacccgcacac

SEQ ID NO: 3084 - RNA, 23 nt, Artificial Sequence
  Description of Artificial Sequence: Synthetic oligonucleotide
aacaagccauagugcacccgcac

SEQ ID NO: 3085 - DNA, 23 bp, Artificial Sequence
  Description of Artificial Sequence: Synthetic oligonucleotide
  Description of Combined DNA/RNA Molecule: Synthetic oligonucleotide
aguacaagccatagugcacccgc

SEQ ID NO: 3086 - DNA, 23 bp, Artificial Sequence
  Description of Artificial Sequence: Synthetic oligonucleotide
  Description of Combined DNA/RNA Molecule: Synthetic oligonucleotide
acuggutguacaagccauagugc

SEQ ID NO: 3087 - DNA, 23 bp, Artificial Sequence
  Description of Artificial Sequence: Synthetic oligonucleotide
  Description of Combined DNA/RNA Molecule: Synthetic oligonucleotide
aguccgacuggtuguacaagcca

SEQ ID NO: 3088 - DNA, 23 bp, Artificial Sequence
  Description of Artificial Sequence: Synthetic oligonucleotide
  Description of Combined DNA/RNA Molecule: Synthetic oligonucleotide
aagaggaacuctccagggcaggg

SEQ ID NO: 3089 - DNA, 23 bp, Artificial Sequence
  Description of Artificial Sequence: Synthetic oligonucleotide
  Description of Combined DNA/RNA Molecule: Synthetic oligonucleotide
agcagutucuctcauccaggccg

SEQ ID NO: 3090 - RNA, 23 nt, Artificial Sequence
  Description of Artificial Sequence: Synthetic oligonucleotide
aaacgcaguuucucucauccagg

SEQ ID NO: 3091 - DNA, 23 bp, Artificial Sequence
  Description of Artificial Sequence: Synthetic oligonucleotide
  Description of Combined DNA/RNA Molecule: Synthetic oligonucleotide
aaaacgcaguutcucucauccag

SEQ ID NO: 3092 - RNA, 23 nt, Artificial Sequence
  Description of Artificial Sequence: Synthetic oligonucleotide
acugcaaacgcaguuucucucau

SEQ ID NO: 3093 - RNA, 23 nt, Artificial Sequence
  Description of Artificial Sequence: Synthetic oligonucleotide
acuggaauguggcucugcaaacg

SEQ ID NO: 3094 - RNA, 23 nt, Artificial Sequence
  Description of Artificial Sequence: Synthetic oligonucleotide
acuggaaggugaaugucccacau

SEQ ID NO: 3095 - RNA, 23 nt, Artificial Sequence
  Description of Artificial Sequence: Synthetic oligonucleotide
aacuggaaggugaaugucccaca

SEQ ID NO: 3096 - RNA, 23 nt, Artificial Sequence
  Description of Artificial Sequence: Synthetic oligonucleotide
aacacuggaaggugaauguccca

SEQ ID NO: 3097 - DNA, 23 bp, Artificial Sequence
  Description of Artificial Sequence: Synthetic oligonucleotide
  Description of Combined DNA/RNA Molecule: Synthetic oligonucleotide
acacactggaaggugaauguccc

SEQ ID NO: 3098 - DNA, 23 bp, Artificial Sequence
  Description of Artificial Sequence: Synthetic oligonucleotide
  Description of Combined DNA/RNA Molecule: Synthetic oligonucleotide
atcacacuggaaggugaaugucc

SEQ ID NO: 3099 - RNA, 23 nt, Artificial Sequence
  Description of Artificial Sequence: Synthetic oligonucleotide
acucacacuggaaggugaauguc

SEQ ID NO: 3100 - RNA, 23 nt, Artificial Sequence
  Description of Artificial Sequence: Synthetic oligonucleotide
aaucacccagcggucagcgauga

SEQ ID NO: 3101 - DNA, 23 bp, Artificial Sequence
  Description of Artificial Sequence: Synthetic oligonucleotide
  Description of Combined DNA/RNA Molecule: Synthetic oligonucleotide
acugtuaucacccagcggucagc

SEQ ID NO: 3102 - DNA, 23 bp, Artificial Sequence
  Description of Artificial Sequence: Synthetic oligonucleotide
  Description of Combined DNA/RNA Molecule: Synthetic oligonucleotide
aacacctugcccaggaacacggu

SEQ ID NO: 3103 - RNA, 23 nt, Artificial Sequence
  Description of Artificial Sequence: Synthetic oligonucleotide
acacaccuugcccaggaacacgg

SEQ ID NO: 3104 - DNA, 23 bp, Artificial Sequence
  Description of Artificial Sequence: Synthetic oligonucleotide
  Description of Combined DNA/RNA Molecule: Synthetic oligonucleotide
acgagutcugccacaccuugccc

SEQ ID NO: 3105 - RNA, 23 nt, Artificial Sequence
  Description of Artificial Sequence: Synthetic oligonucleotide
acgcgaguucugccacaccuugc

SEQ ID NO: 3106 - RNA, 23 nt, Artificial Sequence
  Description of Artificial Sequence: Synthetic oligonucleotide
acuugaaggacaccucuccaggc

SEQ ID NO: 3107 - DNA, 23 bp, Artificial Sequence
  Description of Artificial Sequence: Synthetic oligonucleotide
  Description of Combined DNA/RNA Molecule: Synthetic oligonucleotide
accutgaaggacaccucuccagg

SEQ ID NO: 3108 - DNA, 23 bp, Artificial Sequence
  Description of Artificial Sequence: Synthetic oligonucleotide
  Description of Combined DNA/RNA Molecule: Synthetic oligonucleotide
acaccutgaaggacaccucucca

SEQ ID NO: 3109 - DNA, 23 bp, Artificial Sequence
  Description of Artificial Sequence: Synthetic oligonucleotide
  Description of Combined DNA/RNA Molecule: Synthetic oligonucleotide
atcacctugaaggacaccucucc

SEQ ID NO: 3110 - RNA, 23 nt, Artificial Sequence
  Description of Artificial Sequence: Synthetic oligonucleotide
acugcacagguccugugggauca

SEQ ID NO: 3111 - RNA, 23 nt, Artificial Sequence
  Description of Artificial Sequence: Synthetic oligonucleotide
aacacagcaugcguggcgucacc

SEQ ID NO: 3112 - RNA, 23 nt, Artificial Sequence
  Description of Artificial Sequence: Synthetic oligonucleotide
acacacagcaugcguggcgucac

SEQ ID NO: 3113 - DNA, 23 bp, Artificial Sequence
  Description of Artificial Sequence: Synthetic oligonucleotide
  Description of Combined DNA/RNA Molecule: Synthetic oligonucleotide
acuucutgccctugcgguagccg

SEQ ID NO: 3114 - DNA, 23 bp, Artificial Sequence
  Description of Artificial Sequence: Synthetic oligonucleotide
  Description of Combined DNA/RNA Molecule: Synthetic oligonucleotide
accutctugcccuugcgguagcc

SEQ ID NO: 3115 - DNA, 23 bp, Artificial Sequence
  Description of Artificial Sequence: Synthetic oligonucleotide
  Description of Combined DNA/RNA Molecule: Synthetic oligonucleotide
agacgccgaagtaguuaggccgg

SEQ ID NO: 3116 - RNA, 23 nt, Artificial Sequence
  Description of Artificial Sequence: Synthetic oligonucleotide
aagacgccgaaguaguuaggccg

SEQ ID NO: 3117 - RNA, 23 nt, Artificial Sequence
  Description of Artificial Sequence: Synthetic oligonucleotide
acaccugugaugcggguguagac

SEQ ID NO: 3118 - DNA, 23 bp, Artificial Sequence
  Description of Artificial Sequence: Synthetic oligonucleotide
  Description of Combined DNA/RNA Molecule: Synthetic oligonucleotide
acaccacuugctggauccagcug

SEQ ID NO: 3119 - DNA, 23 bp, Artificial Sequence
  Description of Artificial Sequence: Synthetic oligonucleotide
  Description of Combined DNA/RNA Molecule: Synthetic oligonucleotide
acaagatgccaccuccugccacc

SEQ ID NO: 3120 - RNA, 23 nt, Artificial Sequence
  Description of Artificial Sequence: Synthetic oligonucleotide
aacaagaugccaccuccugccac

SEQ ID NO: 3121 - RNA, 23 nt, Artificial Sequence
  Description of Artificial Sequence: Synthetic oligonucleotide
agacaagaugccaccuccugcca

SEQ ID NO: 3122 - RNA, 23 nt, Artificial Sequence
  Description of Artificial Sequence: Synthetic oligonucleotide
aagacaagaugccaccuccugcc

SEQ ID NO: 3123 - RNA, 23 nt, Artificial Sequence
  Description of Artificial Sequence: Synthetic oligonucleotide
acaucacuggagcagacaucagg

SEQ ID NO: 3124 - RNA, 23 nt, Artificial Sequence
  Description of Artificial Sequence: Synthetic oligonucleotide
aggacggaggagagagaauuggg

SEQ ID NO: 3125 - DNA, 23 bp, Artificial Sequence
  Description of Artificial Sequence: Synthetic oligonucleotide
  Description of Combined DNA/RNA Molecule: Synthetic oligonucleotide
aagcautcuugcugcugagccac

SEQ ID NO: 3126 - DNA, 23 bp, Artificial Sequence
  Description of Artificial Sequence: Synthetic oligonucleotide
  Description of Combined DNA/RNA Molecule: Synthetic oligonucleotide
acagcatucuugcugcugagcca

SEQ ID NO: 3127 - RNA, 23 nt, Artificial Sequence
  Description of Artificial Sequence: Synthetic oligonucleotide
acagaucccaaguuagaccaggg

SEQ ID NO: 3128 - DNA, 23 bp, Artificial Sequence
  Description of Artificial Sequence: Synthetic oligonucleotide
  Description of Combined DNA/RNA Molecule: Synthetic oligonucleotide
accagatcccaaguuagaccagg

SEQ ID NO: 3129 - RNA, 23 nt, Artificial Sequence
  Description of Artificial Sequence: Synthetic oligonucleotide
acccagaucccaaguuagaccag

SEQ ID NO: 3130 - DNA, 23 bp, Artificial Sequence
  Description of Artificial Sequence: Synthetic oligonucleotide
  Description of Combined DNA/RNA Molecule: Synthetic oligonucleotide
acautcccagatcccaaguuaga

SEQ ID NO: 3131 - RNA, 23 nt, Artificial Sequence
  Description of Artificial Sequence: Synthetic oligonucleotide
acuuccauucccagaucccaagu

SEQ ID NO: 3132 - DNA, 23 bp, Artificial Sequence
  Description of Artificial Sequence: Synthetic oligonucleotide
  Description of Combined DNA/RNA Molecule: Synthetic oligonucleotide
acaccutccautcccagauccca

SEQ ID NO: 3133 - RNA, 23 nt, Artificial Sequence
  Description of Artificial Sequence: Synthetic oligonucleotide
accaaagggcagcugagcucacc

SEQ ID NO: 3134 - DNA, 23 bp, Artificial Sequence
  Description of Artificial Sequence: Synthetic oligonucleotide
  Description of Combined DNA/RNA Molecule: Synthetic oligonucleotide
atccaaagggcagcugagcucac

SEQ ID NO: 3135 - RNA, 23 nt, Artificial Sequence
  Description of Artificial Sequence: Synthetic oligonucleotide
aauuccaaagggcagcugagcuc

SEQ ID NO: 3136 - DNA, 23 bp, Artificial Sequence
  Description of Artificial Sequence: Synthetic oligonucleotide
  Description of Combined DNA/RNA Molecule: Synthetic oligonucleotide
acuutatuccaaagggcagcuga

SEQ ID NO: 3137 - DNA, 23 bp, Artificial Sequence
  Description of Artificial Sequence: Synthetic oligonucleotide
  Description of Combined DNA/RNA Molecule: Synthetic oligonucleotide
aagctutauuccaaagggcagcu

SEQ ID NO: 3138 - DNA, 23 bp, Artificial Sequence
  Description of Artificial Sequence: Synthetic oligonucleotide
  Description of Combined DNA/RNA Molecule: Synthetic oligonucleotide
acagcutuauuccaaagggcagc

SEQ ID NO: 3139 - RNA, 21 nt, Artificial Sequence
  Description of Artificial Sequence: Synthetic oligonucleotide
acagacaagaccaucuacacu

SEQ ID NO: 3140 - RNA, 21 nt, Artificial Sequence
  Description of Artificial Sequence: Synthetic oligonucleotide
gaugccaagaacacuaugauu

SEQ ID NO: 3141 - RNA, 21 nt, Artificial Sequence
  Description of Artificial Sequence: Synthetic oligonucleotide
acagagaaauucuacuacauu

SEQ ID NO: 3142 - RNA, 21 nt, Artificial Sequence
  Description of Artificial Sequence: Synthetic oligonucleotide
gaaauucuacuacaucuauau

SEQ ID NO: 3143 - RNA, 21 nt, Artificial Sequence
  Description of Artificial Sequence: Synthetic oligonucleotide
cgagccguucucuacaauuau

SEQ ID NO: 3144 - RNA, 21 nt, Artificial Sequence
  Description of Artificial Sequence: Synthetic oligonucleotide
caagccuuggcucaauaccau

SEQ ID NO: 3145 - RNA, 21 nt, Artificial Sequence
  Description of Artificial Sequence: Synthetic oligonucleotide
gagaaauucuacuacaucuau

SEQ ID NO: 3146 - RNA, 21 nt, Artificial Sequence
  Description of Artificial Sequence: Synthetic oligonucleotide
agauccgagccuacuaugaau

SEQ ID NO: 3147 - RNA, 21 nt, Artificial Sequence
  Description of Artificial Sequence: Synthetic oligonucleotide
agagaaauucuacuauaucuu

SEQ ID NO: 3148 - RNA, 21 nt, Artificial Sequence
  Description of Artificial Sequence: Synthetic oligonucleotide
caaggucuucucucuggcugu

SEQ ID NO: 3149 - RNA, 21 nt, Artificial Sequence
  Description of Artificial Sequence: Synthetic oligonucleotide
ccuacagagaaauucuacuau

SEQ ID NO: 3150 - RNA, 21 nt, Artificial Sequence
  Description of Artificial Sequence: Synthetic oligonucleotide
acagagaaauucuacuacauu

SEQ ID NO: 3151 - RNA, 21 nt, Artificial Sequence
  Description of Artificial Sequence: Synthetic oligonucleotide
gaaauucuacuacaucuauau

SEQ ID NO: 3152 - RNA, 21 nt, Artificial Sequence
  Description of Artificial Sequence: Synthetic oligonucleotide
acccuacucuguuguucgaau

SEQ ID NO: 3153 - DNA, 23 bp, Artificial Sequence
  Description of Artificial Sequence: Synthetic oligonucleotide
  Description of Combined DNA/RNA Molecule: Synthetic oligonucleotide
agugtagauggucuugucugugc

SEQ ID NO: 3154 - DNA, 23 bp, Artificial Sequence
  Description of Artificial Sequence: Synthetic oligonucleotide
  Description of Combined DNA/RNA Molecule: Synthetic oligonucleotide
aaautgtagagaacggcucggau

SEQ ID NO: 3155 - RNA, 23 nt, Artificial Sequence
  Description of Artificial Sequence: Synthetic oligonucleotide
aaucauaguguucuuggcauccu

SEQ ID NO: 3156 - DNA, 23 bp, Artificial Sequence
  Description of Artificial Sequence: Synthetic oligonucleotide
  Description of Combined DNA/RNA Molecule: Synthetic oligonucleotide
aaugtaguagaauuucucugugg

SEQ ID NO: 3157 - RNA, 23 nt, Artificial Sequence
  Description of Artificial Sequence: Synthetic oligonucleotide
auauagauguaguagaauuucuc

SEQ ID NO: 3158 - DNA, 23 bp, Artificial Sequence
  Description of Artificial Sequence: Synthetic oligonucleotide
  Description of Combined DNA/RNA Molecule: Synthetic oligonucleotide
auaatuguagagaacggcucggc

SEQ ID NO: 3159 - DNA, 23 bp, Artificial Sequence
  Description of Artificial Sequence: Synthetic oligonucleotide
  Description of Combined DNA/RNA Molecule: Synthetic oligonucleotide
auggtatugagccaaggcuuggc

SEQ ID NO: 3160 - DNA, 23 bp, Artificial Sequence
  Description of Artificial Sequence: Synthetic oligonucleotide
  Description of Combined DNA/RNA Molecule: Synthetic oligonucleotide
aauagatguagtagaauuucucu

SEQ ID NO: 3161 - RNA, 23 nt, Artificial Sequence
  Description of Artificial Sequence: Synthetic oligonucleotide
auagauguaguagaauuucucug

SEQ ID NO: 3162 - RNA, 23 nt, Artificial Sequence
  Description of Artificial Sequence: Synthetic oligonucleotide
auucauaguaggcucggaucuuc

SEQ ID NO: 3163 - DNA, 23 bp, Artificial Sequence
  Description of Artificial Sequence: Synthetic oligonucleotide
  Description of Combined DNA/RNA Molecule: Synthetic oligonucleotide
aaautgtagagaacggcucggau

SEQ ID NO: 3164 - DNA, 23 bp, Artificial Sequence
  Description of Artificial Sequence: Synthetic oligonucleotide
  Description of Combined DNA/RNA Molecule: Synthetic oligonucleotide
aaautgtagagaacggcucgggc

SEQ ID NO: 3165 - DNA, 23 bp, Artificial Sequence
  Description of Artificial Sequence: Synthetic oligonucleotide
  Description of Combined DNA/RNA Molecule: Synthetic oligonucleotide
aagatataguagaauuucucugu

SEQ ID NO: 3166 - RNA, 23 nt, Artificial Sequence
  Description of Artificial Sequence: Synthetic oligonucleotide
acagccagagagaagaccuuggc

SEQ ID NO: 3167 - DNA, 23 bp, Artificial Sequence
  Description of Artificial Sequence: Synthetic oligonucleotide
  Description of Combined DNA/RNA Molecule: Synthetic oligonucleotide
auagtagaauuucucuguaggcu

SEQ ID NO: 3168 - DNA, 23 bp, Artificial Sequence
  Description of Artificial Sequence: Synthetic oligonucleotide
  Description of Combined DNA/RNA Molecule: Synthetic oligonucleotide
aaugtaguagaauuucucugugg

SEQ ID NO: 3169 - RNA, 23 nt, Artificial Sequence
  Description of Artificial Sequence: Synthetic oligonucleotide
auauagauguaguagaauuucuc

SEQ ID NO: 3170 - RNA, 23 nt, Artificial Sequence
  Description of Artificial Sequence: Synthetic oligonucleotide
auucgaacaacagaguagggugg

SEQ ID NO: 3171 - RNA, 21 nt, Artificial Sequence
  Description of Artificial Sequence: Synthetic oligonucleotide
cuuaaaagggacaguauucua

SEQ ID NO: 3172 - RNA, 21 nt, Artificial Sequence
  Description of Artificial Sequence: Synthetic oligonucleotide
gcuuaaaagggacaguauucu

SEQ ID NO: 3173 - RNA, 21 nt, Artificial Sequence
  Description of Artificial Sequence: Synthetic oligonucleotide
cuuaaaagggacaguauucuu

SEQ ID NO: 3174 - RNA, 19 nt, Artificial Sequence
  Description of Artificial Sequence: Synthetic oligonucleotide
uaaaagggacaguauucua

SEQ ID NO: 3175 - RNA, 19 nt, Artificial Sequence
  Description of Artificial Sequence: Synthetic oligonucleotide
uuaaaagggacaguauucu

SEQ ID NO: 3176 - RNA, 19 nt, Artificial Sequence
  Description of Artificial Sequence: Synthetic oligonucleotide
uaaaagggacaguauucuu

SEQ ID NO: 3177 - RNA, 21 nt, Artificial Sequence
  Description of Artificial Sequence: Synthetic oligonucleotide
aaaagggacaguauucucagu

SEQ ID NO: 3178 - RNA, 19 nt, Artificial Sequence
  Description of Artificial Sequence: Synthetic oligonucleotide
aagggacaguauucucagu

SEQ ID NO: 3179 - RNA, 23 nt, Artificial Sequence
  Description of Artificial Sequence: Synthetic oligonucleotide
uagaauacugucccuuuuaagcc

SEQ ID NO: 3180 - DNA, 23 bp, Artificial Sequence
  Description of Artificial Sequence: Synthetic oligonucleotide
  Description of Combined DNA/RNA Molecule: Synthetic oligonucleotide
agaatacugucccuuuuaagcaa

SEQ ID NO: 3181 - DNA, 23 bp, Artificial Sequence
  Description of Artificial Sequence: Synthetic oligonucleotide
  Description of Combined DNA/RNA Molecule: Synthetic oligonucleotide
agaatacugucccuuuuaagcgc

SEQ ID NO: 3182 - RNA, 23 nt, Artificial Sequence
  Description of Artificial Sequence: Synthetic oligonucleotide
aagaauacugucccuuuuaagcc

SEQ ID NO: 3183 - RNA, 21 nt, Artificial Sequence
  Description of Artificial Sequence: Synthetic oligonucleotide
uagaauacugucccuuuuaag

SEQ ID NO: 3184 - DNA, 21 bp, Artificial Sequence
  Description of Artificial Sequence: Synthetic oligonucleotide
  Description of Combined DNA/RNA Molecule: Synthetic oligonucleotide
agaatacugucccuuuuaagc

SEQ ID NO: 3185 - RNA, 21 nt, Artificial Sequence
  Description of Artificial Sequence: Synthetic oligonucleotide
aagaauacugucccuuuuaag

SEQ ID NO: 3186 - RNA, 23 nt, Artificial Sequence
  Description of Artificial Sequence: Synthetic oligonucleotide
acugagaauacugucccuuuuaa

SEQ ID NO: 3187 - RNA, 23 nt, Artificial Sequence
  Description of Artificial Sequence: Synthetic oligonucleotide
acugagaauacugucccuuuugc

SEQ ID NO: 3188 - RNA, 23 nt, Artificial Sequence
  Description of Artificial Sequence: Synthetic oligonucleotide
acugagaauacugucccuuuucc

SEQ ID NO: 3189 - RNA, 21 nt, Artificial Sequence
  Description of Artificial Sequence: Synthetic oligonucleotide
acugagaauacugucccuuuu

SEQ ID NO: 3190 - RNA, 21 nt, Artificial Sequence
  Description of Artificial Sequence: Synthetic oligonucleotide
cuucuggucuaaacaaacuaa

SEQ ID NO: 3191 - RNA, 21 nt, Artificial Sequence
  Description of Artificial Sequence: Synthetic oligonucleotide
uuaaucucacauaguaaucua

SEQ ID NO: 3192 - RNA, 21 nt, Artificial Sequence
  Description of Artificial Sequence: Synthetic oligonucleotide
uaacuuuaaucucauauagca

SEQ ID NO: 3193 - RNA, 21 nt, Artificial Sequence
  Description of Artificial Sequence: Synthetic oligonucleotide
ccugaucuucugguuuaaaca

SEQ ID NO: 3194 - RNA, 21 nt, Artificial Sequence
  Description of Artificial Sequence: Synthetic oligonucleotide
uguacaguaagugauaacaga

SEQ ID NO: 3195 - RNA, 21 nt, Artificial Sequence
  Description of Artificial Sequence: Synthetic oligonucleotide
uucgugguauucuuacuagua

SEQ ID NO: 3196 - RNA, 21 nt, Artificial Sequence
  Description of Artificial Sequence: Synthetic oligonucleotide
ucuucuggucuaaaugaacua

SEQ ID NO: 3197 - RNA, 21 nt, Artificial Sequence
  Description of Artificial Sequence: Synthetic oligonucleotide
ucgugcuacaacuuucucaaa

SEQ ID NO: 3198 - RNA, 21 nt, Artificial Sequence
  Description of Artificial Sequence: Synthetic oligonucleotide
guuguguacacacauugguaa

SEQ ID NO: 3199 - RNA, 21 nt, Artificial Sequence
  Description of Artificial Sequence: Synthetic oligonucleotide
cgugcuacaacuucuucaaga

SEQ ID NO: 3200 - RNA, 21 nt, Artificial Sequence
  Description of Artificial Sequence: Synthetic oligonucleotide
ugaaauuguugacauugugaa

SEQ ID NO: 3201 - RNA, 21 nt, Artificial Sequence
  Description of Artificial Sequence: Synthetic oligonucleotide
acaauguugcuuuuuaaacua

SEQ ID NO: 3202 - RNA, 21 nt, Artificial Sequence
  Description of Artificial Sequence: Synthetic oligonucleotide
aaauuguugacacuaugagua

SEQ ID NO: 3203 - RNA, 21 nt, Artificial Sequence
  Description of Artificial Sequence: Synthetic oligonucleotide
gcugaaauuguugauacugua

SEQ ID NO: 3204 - RNA, 21 nt, Artificial Sequence
  Description of Artificial Sequence: Synthetic oligonucleotide
uguugacacugugaaugcuua

SEQ ID NO: 3205 - RNA, 21 nt, Artificial Sequence
  Description of Artificial Sequence: Synthetic oligonucleotide
acauugccaaaagguuucuaa

SEQ ID NO: 3206 - RNA, 21 nt, Artificial Sequence
  Description of Artificial Sequence: Synthetic oligonucleotide
uucugcuaaucuuguugcuaa

SEQ ID NO: 3207 - RNA, 21 nt, Artificial Sequence
  Description of Artificial Sequence: Synthetic oligonucleotide
aucuuguuuucucuauucaaa

SEQ ID NO: 3208 - RNA, 21 nt, Artificial Sequence
  Description of Artificial Sequence: Synthetic oligonucleotide
cagucauaaucuauauuaaaa

SEQ ID NO: 3209 - RNA, 21 nt, Artificial Sequence
  Description of Artificial Sequence: Synthetic oligonucleotide
ugguaacacuaauaauaaaaa

SEQ ID NO: 3210 - RNA, 21 nt, Artificial Sequence
  Description of Artificial Sequence: Synthetic oligonucleotide
ccucauggaagagaagcagau

SEQ ID NO: 3211 - RNA, 21 nt, Artificial Sequence
  Description of Artificial Sequence: Synthetic oligonucleotide
ccggucagguucugcuuuuaa

SEQ ID NO: 3212 - DNA, 23 bp, Artificial Sequence
  Description of Artificial Sequence: Synthetic oligonucleotide
  Description of Combined DNA/RNA Molecule: Synthetic oligonucleotide
uuagtutguuuagaccagaagau

SEQ ID NO: 3213 - DNA, 23 bp, Artificial Sequence
  Description of Artificial Sequence: Synthetic oligonucleotide
  Description of Combined DNA/RNA Molecule: Synthetic oligonucleotide
uagatuacuaugugagauuaaag

SEQ ID NO: 3214 - RNA, 23 nt, Artificial Sequence
  Description of Artificial Sequence: Synthetic oligonucleotide
ugcuauaugagauuaaaguuaac

SEQ ID NO: 3215 - DNA, 23 bp, Artificial Sequence
  Description of Artificial Sequence: Synthetic oligonucleotide
  Description of Combined DNA/RNA Molecule: Synthetic oligonucleotide
uguutaaaccagaagaucaggaa

SEQ ID NO: 3216 - DNA, 23 bp, Artificial Sequence
  Description of Artificial Sequence: Synthetic oligonucleotide
  Description of Combined DNA/RNA Molecule: Synthetic oligonucleotide
ucugtuaucacuuacuguacaag

SEQ ID NO: 3217 - DNA, 23 bp, Artificial Sequence
  Description of Artificial Sequence: Synthetic oligonucleotide
  Description of Combined DNA/RNA Molecule: Synthetic oligonucleotide
uacuagtaagaauaccacgaaag

SEQ ID NO: 3218 - DNA, 23 bp, Artificial Sequence
  Description of Artificial Sequence: Synthetic oligonucleotide
  Description of Combined DNA/RNA Molecule: Synthetic oligonucleotide
uagutcauuuagaccagaagauc

SEQ ID NO: 3219 - RNA, 23 nt, Artificial Sequence
  Description of Artificial Sequence: Synthetic oligonucleotide
uuugagaaaguuguagcacgauu

SEQ ID NO: 3220 - RNA, 23 nt, Artificial Sequence
  Description of Artificial Sequence: Synthetic oligonucleotide
uuaccaauguguguacacaacau

SEQ ID NO: 3221 - RNA, 23 nt, Artificial Sequence
  Description of Artificial Sequence: Synthetic oligonucleotide
ucuugaagaaguuguagcacgau

SEQ ID NO: 3222 - RNA, 23 nt, Artificial Sequence
  Description of Artificial Sequence: Synthetic oligonucleotide
uucacaaugucaacaauuucagc

SEQ ID NO: 3223 - DNA, 23 bp, Artificial Sequence
  Description of Artificial Sequence: Synthetic oligonucleotide
  Description of Combined DNA/RNA Molecule: Synthetic oligonucleotide
uagutuaaaaagcaacauuguua

SEQ ID NO: 3224 - DNA, 23 bp, Artificial Sequence
  Description of Artificial Sequence: Synthetic oligonucleotide
  Description of Combined DNA/RNA Molecule: Synthetic oligonucleotide
uacucatagugucaacaauuuca

SEQ ID NO: 3225 - RNA, 23 nt, Artificial Sequence
  Description of Artificial Sequence: Synthetic oligonucleotide
uacaguaucaacaauuucagcag

SEQ ID NO: 3226 - DNA, 23 bp, Artificial Sequence
  Description of Artificial Sequence: Synthetic oligonucleotide
  Description of Combined DNA/RNA Molecule: Synthetic oligonucleotide
uaagcatucacagugucaacaau

SEQ ID NO: 3227 - RNA, 23 nt, Artificial Sequence
  Description of Artificial Sequence: Synthetic oligonucleotide
uuagaaaccuuuuggcaauguug

SEQ ID NO: 3228 - RNA, 23 nt, Artificial Sequence
  Description of Artificial Sequence: Synthetic oligonucleotide
uuagcaacaagauuagcagaagc

SEQ ID NO: 3229 - DNA, 23 bp, Artificial Sequence
  Description of Artificial Sequence: Synthetic oligonucleotide
  Description of Combined DNA/RNA Molecule: Synthetic oligonucleotide
uuugaatagagaaaacaagauga

SEQ ID NO: 3230 - DNA, 23 bp, Artificial Sequence
  Description of Artificial Sequence: Synthetic oligonucleotide
  Description of Combined DNA/RNA Molecule: Synthetic oligonucleotide
uuuuaatauagauuaugacugug

SEQ ID NO: 3231 - DNA, 23 bp, Artificial Sequence
  Description of Artificial Sequence: Synthetic oligonucleotide
  Description of Combined DNA/RNA Molecule: Synthetic oligonucleotide
uuuutatuauuaguguuaccaca

SEQ ID NO: 3232 - DNA, 23 bp, Artificial Sequence
  Description of Artificial Sequence: Synthetic oligonucleotide
  Description of Combined DNA/RNA Molecule: Synthetic oligonucleotide
aucugctucucuuccaugaggcu

SEQ ID NO: 3233 - RNA, 23 nt, Artificial Sequence
  Description of Artificial Sequence: Synthetic oligonucleotide
uuaaaagcagaaccugaccggcc

1. A dsRNA agent comprising a sense strand and antisense, each strand independently having a length of 15-35 nucleotides wherein each nucleotide is independently modified or unmodified, wherein
the sense strand comprises a 2′-fluoro nucleotide at position 10, counting from 5′-end of the sense strand, and
the antisense strand comprises a 2′-deoxy nucleotide at positions 2, 5, 7 and 12, counting from 5′-end of the antisense strand, and
wherein:
(i) the antisense strand comprises a 2′-fluoro nucleotide at position 14 and a nucleotide other than a 2′-deoxy or 2′-fluoro nucleotide at position 16, counting from the 5′-end of the antisense strand; or
(ii) the antisense strand comprises a 2′-deoxy nucleotide at position 14 or 16, counting from the 5′-end of the antisense strand, and the sense strand comprises a nucleotide other than a 2′-fluoro nucleotide at position 7, counting from the 5′-end of the sense strand.

2. The dsRNA agent of claim 1, wherein the sense strand further comprises a 2′-fluoro nucleotide at position 9 or 11, counting from 5′-end of the sense strand.

3. (canceled)

4. The dsRNA of claim 1, wherein the sense strand further comprises a 2′-fluoro nucleotide at positions 9 and 11, counting from 5-end of the sense strand.

5. The dsRNA agent of claim 1, wherein the sense strand comprises a 2′-fluoro nucleotide at positions 8 and 9 or positions 11 and 12, counting from 5-end of the sense strand.

6. (canceled)

7. The dsRNA agent of claim 1, wherein the sense strand comprises a nucleotide other than a 2′-fluoro at position 7, counting from the 5′-end of the sense strand.

8. The dsRNA of claim 1, wherein the sense strand comprises a 2′-fluoro nucleotide at positions 9, 10 and 11, and a nucleotide other than a 2′-fluoro at position 7, counting from the 5′-end of the sense strand.

9. The dsRNA agent of claim 1, wherein the sense strand comprises at least one 2′-OMe nucleotide.

10. The dsRNA agent of claim 1, wherein the sense strand comprises a 2′-OMe nucleotide at position 7, counting from the 5′-end of the sense strand.

11. The dsRNA agent of claim 1, wherein the sense strand comprises a 2′-fluoro nucleotide at positions 9, 10 and 11, and a 2′-OMe nucleotide at position 7, counting from the 5′-end of the sense strand.

12. (canceled)

13. (canceled)

14. The dsRNA agent of claim 1, wherein the antisense strand comprises a 2′-OMe nucleotide at position 16, counting from the 5′-end of the antisense strand.

15. (canceled)

16. (canceled)

17. (canceled)

18. (canceled)

19. (canceled)

20. (canceled)

21. (canceled)

22. (canceled)

23. (canceled)

24. (canceled)

25. (canceled)

26. The dsRNA agent of claim 1, wherein the dsRNA agent comprises a ligand.

27. The dsRNA agent of claim 1, wherein the sense strand comprises a ligand.

28. The dsRNA agent of claim 27, wherein the ligand is at 3′-end of the sense strand.

29. The dsRNA agent of claim 27, wherein the ligand is at 5′-end of the sense strand.

30. The dsRNA agent of claim 27, wherein the ligand comprises an ASGPR ligand.

31. The dsRNA agent of claim 27, wherein the ligand is lipophilic group.

32. The dsRNA agent of claim 31, wherein the ligand is a C₁₀₋₃₀aliphatic group.

33. The dsRNA agent of claim 32, wherein the C₁₀₋₃₀aliphatic group is a C₁₀₋₃₀alkyl group.

34. The dsRNA agent of claim 33, wherein the C₁₀₋₃₀alkyl group is a straight-chain or branched tetradecyl, hexadecyl, octadecyl, icosyl, docosyl, or tetracosyl group.

35. The dsRNA agent of claim 23, wherein the ligand is conjugated to a non-terminal nucleotide of the sense strand.

36. The dsRNA agent of claim 35, wherein the ligand is conjugated to the 2′-position of a non-terminal nucleotide of the sense strand, optionally conjugated to one of positions 5, 6, 7, or 8 of the sense strand, counting from the 5′ end).

37. The dsRNA agent of claim 26, wherein the ligand comprises an abasic nucleotide, optionally the abasic nucleotide is an inverted nucleotide and linked via a 5′->5′ or a 3′->3′ linkage to a strand of the dsRNA agent.

38. (canceled)

39. (canceled)

40. (canceled)

41. (canceled)

42. (canceled)

43. (canceled)

44. The dsRNA agent of claim 1, wherein the sense strand comprises at least two phosphorothioate internucleotide linkages between the first five nucleotides counting from the 5′ end of the sense strand.

45. The dsRNA agent of claim 1, wherein the antisense strand comprises at least two phosphorothioate internucleotide linkages between the first five nucleotides counting from the 5′ end of the antisense strand and at least two phosphorothioate internucleotide linkages between the first five nucleotides counting from the 3′ end of the antisense strand.

46. The dsRNA agent of claim 1, wherein the dsRNA has a duplex region of from 18 to about 25 basepairs.

47. (canceled)

48. (canceled)

49. A dsRNA agent comprising a sense strand and an antisense strand,
wherein the sense strand is 18-23 nucleotides in length and comprises a 2′-fluoro nucleotide at position 10, counting from 5′-end of the sense strand and a 2′-fluoro nucleotide at position 9 or 11, counting from 5′-end of the sense strand, and the antisense strand is 18-25 nucleotide in length and comprises a 2′-deoxy nucleotide at positions 2, 5, 7, and 12, counting from 5′-end of the antisense strand,
wherein:
the antisense strand comprises a 2′-fluoro nucleotide at position 14 and a nucleotide other than a 2′-deoxy or 2′-fluoro nucleotide at position 16, counting from the 5′-end of the antisense strand.

50. The dsRNA agent of claim 49, wherein the sense strand comprises a 2′-fluoro nucleotide at positions 9, 10 and 11, counting from 5′-end of the sense strand.

51. The dsRNA agent of claim 1, comprising a phosphate mimic at the 5′-end of the antisense strand.

52. The dsRNA agent of claim 51, wherein the phosphate mimic is a 5′-E-vinyl phosphonate.

53. (canceled)

54. The dsRNA agent of claim 49, wherein remaining nucleotides in the sense strand are unmodified nucleotides or modified nucleotides, optionally selected from the groups consisting of 2′-OMe, 2′-F, 2′-H, and an 2′-O—C₁₀₋₃₀aliphatic group, provided no more than one modified nucleotide is an 2′-O—C₁₀₋₃₀aliphatic group; and the remaining nucleotides in the antisense strand are unmodified nucleotides or modified nucleotides, optionally selected from the group consisting of 2′-OMe, 2′-F, 2′-H, GNA and 3′-RNA, the 3′-RNA being optionally 3′-OH, provided no more than one modified nucleotide is GNA or 3′-RNA.

55. The dsRNA agent of claim 54, wherein remaining nucleotides (i.e., nucleotides at positions not otherwise defined) in the sense strand are modified nucleotides selected from the group consisting of 2′-OMe, 2′-F, 2′-H, and an 2′-O—C₁₀₋₃₀aliphatic group, provided no more than one modified nucleotide is an 2′-O—C₁₀₋₃₀aliphatic group; and the remaining nucleotides in the antisense strand are modified nucleotides selected from the group consisting of 2′-OMe, 2′-F, 2′-H, GNA, and 3′-RNA, the 3′-RNA being optionally 3′-OH, provided no more than one modified nucleotide is GNA or 3′-RNA.

56. (canceled)

57. (canceled)
